United States Patent Application Publication US 2026/0297614 A1, published October 1, 2026 (application 19/475,889).

The application's sequence listing, which the Patent Office published only in electronic form, follows.

SEQUENCE LISTING (6406 sequences)

SEQ ID NO: 1 - protein, 743 aa, synthetic construct
MAADGYLPDWLEDNLSEGIREWWALKPGAPQPKANQQHQDNARGLVLPGYKYLGPGNGLDKGEPVNAADAAALEHDKAYDQQLKAGDNPYLKYNHADAEFQERLKEDTSFGGNLGRAVFQAKKRLLEPLGLVEEAAKTAPGKKRPVEQSPQEPDSSAGIGKSGAQPAKKRLNFGQTGDTESVPDPQPIGEPPAAPSGVGSLTMASGGGAPVADNNEGADGVGSSSGNWHCDSQWLGDRVITTSTRTWALPTYNNHLYKQISNSTSGGSSNDNAYFGYSTPWGYFDFNRFHCHFSPRDWQRLINNNWGFRPKRLNFKLFNIQVKEVTDNNGVKTIANNLTSTVQVFTDSDYQLPYVLGSAHEGCLPPFPADVFMIPQYGYLTLNDGSQAVGRSSFYCLEYFPSQMLRTGNNFQFSYEFENVPFHSSYAHSQSLDRLMNPLIDQYLYYLSKTINGSGQNQQTLKFSVAGPSNMAVQGRNYIPGPSYRQQRVSTTVTQNNNSEFAWPGASSWALNGRNSLMNPGPAMASHKEGEDRFFPLSGSLIFGKQGTGRDNVDADKVMITNEEEIKTTNPVATESYGQVATNHQSDGTLAVPFKAQAQTGWVQNQGILPGMVWQDRDVYLQGPIWAKIPHTDGNFHPSPLMGGFGMKHPPPQILIKNTPVPADPPTAFNKDKLNSFITQYSTGQVSVEIEWELQKENSKRWNPEIQYTSNYYKSNNVEFAVNTEGVYSEPRPIGTRYLTRNL

SEQ ID NO: 2 - protein, 6 aa, synthetic construct
HDSPHK

SEQ ID NO: 3 - DNA, 18 bp, synthetic construct
  source 1..18: mol_type = other DNA
cacgacagcccacacaaa

SEQ ID NO: 4 - protein, 742 aa, synthetic construct
MAADGYLPDWLEDNLSEGIREWWALKPGAPQPKANQQHQDNARGLVLPGYKYLGPGNGLDKGEPVNAADAAALEHDKAYDQQLKAGDNPYLKYNHADAEFQERLKEDTSFGGNLGRAVFQAKKRLLEPLGLVEEAAKTAPGKKRPVEQSPQEPDSSAGIGKSGAQPAKKRLNFGQTGDTESVPDPQPIGEPPAAPSGVGSLTMASGGGAPVADNNEGADGVGSSSGNWHCDSQWLGDRVITTSTRTWALPTYNNHLYKQISNSTSGGSSNDNAYFGYSTPWGYFDFNRFHCHFSPRDWQRLINNNWGFRPKRLNFKLFNIQVKEVTDNNGVKTIANNLTSTVQVFTDSDYQLPYVLGSAHEGCLPPFPADVFMIPQYGYLTLNDGSQAVGRSSFYCLEYFPSQMLRTGNNFQFSYEFENVPFHSSYAHSQSLDRLMNPLIDQYLYYLSKTSNASGSPHSKAHNQQTLKFSVAGPSNMAVQGRNYIPGPSYRQQRVSTTVTQNNNSEFAWPGASSWALNGRNSLMNPGPAMASHKEGEDRFFPLSGSLIFGKQGTGRDNVDADKVMITNEEEIKTTNPVATESYGQVATNHQSAQAQAQTGWVQNQGILPGMVWQDRDVYLQGPIWAKIPHTDGNFHPSPLMGGFGMKHPPPQILIKNTPVPADPPTAFNKDKLNSFITQYSTGQVSVEIEWELQKENSKRWNPEIQYTSNYYKSNNVEFAVNTEGVYSEPRPIGTRYLTRNL

SEQ ID NO: 5 - protein, 742 aa, synthetic construct
MAADGYLPDWLEDNLSEGIREWWALKPGAPQPKANQQHQDNARGLVLPGYKYLGPGNGLDKGEPVNAADAAALEHDKAYDQQLKAGDNPYLKYNHADAEFQERLKEDTSFGGNLGRAVFQAKKRLLEPLGLVEEAAKTAPGKKRPVEQSPQEPDSSAGIGKSGAQPAKKRLNFGQTGDTESVPDPQPIGEPPAAPSGVGSLTMASGGGAPVADNNEGADGVGSSSGNWHCDSQWLGDRVITTSTRTWALPTYNNHLYKQISNSTSGGSSNDNAYFGYSTPWGYFDFNRFHCHFSPRDWQRLINNNWGFRPKRLNFKLFNIQVKEVTDNNGVKTIANNLTSTVQVFTDSDYQLPYVLGSAHEGCLPPFPADVFMIPQYGYLTLNDGSQAVGRSSFYCLEYFPSQMLRTGNNFQFSYEFENVPFHSSYAHSQSLDRLMNPLIDQYLYYLSKNSIGSGSPHSKAQNQQTLKFSVAGPSNMAVQGRNYIPGPSYRQQRVSTTVTQNNNSEFAWPGASSWALNGRNSLMNPGPAMASHKEGEDRFFPLSGSLIFGKQGTGRDNVDADKVMITNEEEIKTTNPVATESYGQVATNHQSAQAQAQTGWVQNQGILPGMVWQDRDVYLQGPIWAKIPHTDGNFHPSPLMGGFGMKHPPPQILIKNTPVPADPPTAFNKDKLNSFITQYSTGQVSVEIEWELQKENSKRWNPEIQYTSNYYKSNNVEFAVNTEGVYSEPRPIGTRYLTRNL

SEQ ID NO: 6 - protein, 742 aa, synthetic construct
MAADGYLPDWLEDNLSEGIREWWALKPGAPQPKANQQHQDNARGLVLPGYKYLGPGNGLDKGEPVNAADAAALEHDKAYDQQLKAGDNPYLKYNHADAEFQERLKEDTSFGGNLGRAVFQAKKRLLEPLGLVEEAAKTAPGKKRPVEQSPQEPDSSAGIGKSGAQPAKKRLNFGQTGDTESVPDPQPIGEPPAAPSGVGSLTMASGGGAPVADNNEGADGVGSSSGNWHCDSQWLGDRVITTSTRTWALPTYNNHLYKQISNSTSGGSSNDNAYFGYSTPWGYFDFNRFHCHFSPRDWQRLINNNWGFRPKRLNFKLFNIQVKEVTDNNGVKTIANNLTSTVQVFTDSDYQLPYVLGSAHEGCLPPFPADVFMIPQYGYLTLNDGSQAVGRSSFYCLEYFPSQMLRTGNNFQFSYEFENVPFHSSYAHSQSLDRLMNPLIDQYLYYLSKTVNGHDSPHKSGQRPSTLKFSVAGPSNMAVQGRNYIPGPSYRQQRVSTTVTQNNNSEFAWPGASSWALNGRNSLMNPGPAMASHKEGEDRFFPLSGSLIFGKQGTGRDNVDADKVMITNEEEIKTTNPVATESYGQVATNHQSAQAQAQTGWVQNQGILPGMVWQDRDVYLQGPIWAKIPHTDGNFHPSPLMGGFGMKHPPPQILIKNTPVPADPPTAFNKDKLNSFITQYSTGQVSVEIEWELQKENSKRWNPEIQYTSNYYKSNNVEFAVNTEGVYSEPRPIGTRYLTRNL

SEQ ID NO: 7 - protein, 742 aa, synthetic construct
MAADGYLPDWLEDNLSEGIREWWALKPGAPQPKANQQHQDNARGLVLPGYKYLGPGNGLDKGEPVNAADAAALEHDKAYDQQLKAGDNPYLKYNHADAEFQERLKEDTSFGGNLGRAVFQAKKRLLEPLGLVEEAAKTAPGKKRPVEQSPQEPDSSAGIGKSGAQPAKKRLNFGQTGDTESVPDPQPIGEPPAAPSGVGSLTMASGGGAPVADNNEGADGVGSSSGNWHCDSQWLGDRVITTSTRTWALPTYNNHLYKQISNSTSGGSSNDNAYFGYSTPWGYFDFNRFHCHFSPRDWQRLINNNWGFRPKRLNFKLFNIQVKEVTDNNGVKTIANNLTSTVQVFTDSDYQLPYVLGSAHEGCLPPFPADVFMIPQYGYLTLNDGSQAVGRSSFYCLEYFPSQMLRTGNNFQFSYEFENVPFHSSYAHSQSLDRLMNPLIDQYLYYLSKAENGSGSPHSKAQNQQTLKFSVAGPSNMAVQGRNYIPGPSYRQQRVSTTVTQNNNSEFAWPGASSWALNGRNSLMNPGPAMASHKEGEDRFFPLSGSLIFGKQGTGRDNVDADKVMITNEEEIKTTNPVATESYGQVATNHQSAQAQAQTGWVQNQGILPGMVWQDRDVYLQGPIWAKIPHTDGNFHPSPLMGGFGMKHPPPQILIKNTPVPADPPTAFNKDKLNSFITQYSTGQVSVEIEWELQKENSKRWNPEIQYTSNYYKSNNVEFAVNTEGVYSEPRPIGTRYLTRNL

SEQ ID NO: 8 - protein, 742 aa, synthetic construct
MAADGYLPDWLEDNLSEGIREWWALKPGAPQPKANQQHQDNARGLVLPGYKYLGPGNGLDKGEPVNAADAAALEHDKAYDQQLKAGDNPYLKYNHADAEFQERLKEDTSFGGNLGRAVFQAKKRLLEPLGLVEEAAKTAPGKKRPVEQSPQEPDSSAGIGKSGAQPAKKRLNFGQTGDTESVPDPQPIGEPPAAPSGVGSLTMASGGGAPVADNNEGADGVGSSSGNWHCDSQWLGDRVITTSTRTWALPTYNNHLYKQISNSTSGGSSNDNAYFGYSTPWGYFDFNRFHCHFSPRDWQRLINNNWGFRPKRLNFKLFNIQVKEVTDNNGVKTIANNLTSTVQVFTDSDYQLPYVLGSAHEGCLPPFPADVFMIPQYGYLTLNDGSQAVGRSSFYCLEYFPSQMLRTGNNFQFSYEFENVPFHSSYAHSQSLDRLMNPLIDQYLYYLSKTINGSGSPHKSGQNQQPLKFSVAGPSNMAVQGRNYIPGPSYRQQRVSTTVTQNNNSEFAWPGASSWALNGRNSLMNPGPAMASHKEGEDRFFPLSGSLIFGKQGTGRDNVDADKVMITNEEEIKTTNPVATESYGQVATNHQSAQAQAQTGWVQNQGILPGMVWQDRDVYLQGPIWAKIPHTDGNFHPSPLMGGFGMKHPPPQILIKNTPVPADPPTAFNKDKLNSFITQYSTGQVSVEIEWELQKENSKRWNPEIQYTSNYYKSNNVEFAVNTEGVYSEPRPIGTRYLTRNL

SEQ ID NO: 9 - DNA, 2226 bp, synthetic construct
  source 1..2226: mol_type = other DNA
atggctgccgatggttatcttccagattggctcgaggacaaccttagtgaaggaattcgcgagtggtgggctttgaaacctggagcccctcaacccaaggcaaatcaacaacatcaagacaacgctcgaggtcttgtgcttccgggttacaaataccttggacccggcaacggactcgacaagggggagccggtcaacgcagcagacgcggcggccctcgagcacgacaaggcctacgaccagcagctcaaggccggagacaacccgtacctcaagtacaaccacgccgacgccgagttccaggagcggctcaaagaagatacgtcttttgggggcaacctcgggcgagcagtcttccaggccaaaaagaggcttcttgaacctcttggtctggttgaggaagcggctaagacggctcctggaaagaagaggcctgtagagcagtctcctcaggaaccggactcctccgcgggtattggcaaatcgggtgcacagcccgctaaaaagagactcaatttcggtcagactggcgacacagagtcagtcccagaccctcaaccaatcggagaacctcccgcagccccctcaggtgtgggatctcttacaatggcttcaggtggtggcgcaccagtggcagacaataacgaaggtgccgatggagtgggtagttcctcgggaaattggcattgcgattcccaatggctgggggacagagtcatcaccaccagcacccgaacctgggccctgcccacctacaacaatcacctctacaagcaaatctccaacagcacatctggaggatcttcaaatgacaacgcctacttcggctacagcaccccctgggggtattttgacttcaacagattccactgccacttctcaccacgtgactggcagcgactcatcaacaacaactggggattccggcctaagcgactcaacttcaagctcttcaacattcaggtcaaagaggttacggacaacaatggagtcaagaccatcgccaataaccttaccagcacggtccaggtcttcacggactcagactatcagctcccgtacgtgctcgggtcggctcacgagggctgcctcccgccgttcccagcggacgttttcatgattcctcagtacgggtatctgacgcttaatgatggaagccaggccgtgggtcgttcgtccttttactgcctggaatatttcccgtcgcaaatgctaagaacgggtaacaacttccagttcagctacgagtttgagaacgtacctttccatagcagctacgctcacagccaaagcctggaccgactaatgaatccactcatcgaccaatacttgtactatctctctaagactgagaatgtgagcgggagccctcatagcaaggctcagaatcagcagactctaaaattcagtgtggccggacccagcaacatggctgtccagggaagaaactacatacctggacccagctaccgacaacaacgtgtctcaaccactgtgactcaaaacaacaacagcgaatttgcttggcctggagcttcttcttgggctctcaatggacgtaatagcttgatgaatcctggacctgctatggccagccacaaagaaggagaggaccgtttctttcctttgtctggatctttaatttttggcaaacaaggaactggaagagacaacgtggatgcggacaaagtcatgataaccaacgaagaagaaattaaaactactaacccggtagcaacggagtcctatggacaagtggccacaaaccaccagagtgcccaagcacaggcgcagaccggctgggttcaaaaccaaggaatacttccgggtatggtttggcaggacagagatgtgtacctgcaaggacccatttgggccaaaattcctcacacggacggcaactttcacccttctccgctgatgggagggtttggaatgaagcacccgcctcctcagatcctcatcaaaaacacacctgtacctgcggatcctccaacggccttcaacaaggacaagctgaactctttcatcacccagtattctactggccaagtcagcgtggagatcgagtgggagctgcagaaggaaaacagcaagcgctggaacccggagatccagtacacttccaactattacaagtctaataatgttgaatttgctgttaatactgaaggtgtatatagtgaaccccgccccattggcaccagatacctgactcgtaatctg

SEQ ID NO: 10 - protein, 9 aa, synthetic construct
  VARIANT 1: note = Any amino acid
  VARIANT 7: note = Any amino acid
  VARIANT 9: note = Any amino acid
XSGSPHXKX

SEQ ID NO: 11 - protein, 736 aa, synthetic construct
MAADGYLPDWLEDNLSEGIREWWALKPGAPQPKANQQHQDNARGLVLPGYKYLGPGNGLDKGEPVNAADAAALEHDKAYDQQLKAGDNPYLKYNHADAEFQERLKEDTSFGGNLGRAVFQAKKRLLEPLGLVEEAAKTAPGKKRPVEQSPQEPDSSAGIGKSGAQPAKKRLNFGQTGDTESVPDPQPIGEPPAAPSGVGSLTMASGGGAPVADNNEGADGVGSSSGNWHCDSQWLGDRVITTSTRTWALPTYNNHLYKQISNSTSGGSSNDNAYFGYSTPWGYFDFNRFHCHFSPRDWQRLINNNWGFRPKRLNFKLFNIQVKEVTDNNGVKTIANNLTSTVQVFTDSDYQLPYVLGSAHEGCLPPFPADVFMIPQYGYLTLNDGSQAVGRSSFYCLEYFPSQMLRTGNNFQFSYEFENVPFHSSYAHSQSLDRLMNPLIDQYLYYLSRTINGSGQNQQTLKFSVAGPSNMAVQGRNYIPGPSYRQQRVSTTVTQNNNSEFAWPGASSWALNGRNSLMNPGPAMASHKEGEDRFFPLSGSLIFGKQGTGRDNVDADKVMITNEEEIKTTNPVATESYGQVATNHQSAQAQAQTGWVQNQGILPGMVWQDRDVYLQGPIWAKIPHTDGNFHPSPLMGGFGMKHPPPQILIKNTPVPADPPTAFNKDKLNSFITQYSTGQVSVEIEWELQKENSKRWNPEIQYTSNYYKSNNVEFAVNTEGVYSEPRPIGTRYLTRNL

SEQ ID NO: 12 - protein, 743 aa, synthetic construct
MAADGYLPDWLEDNLSEGIREWWALKPGAPQPKANQQHQDNARGLVLPGYKYLGPGNGLDKGEPVNAADAAALEHDKAYDQQLKAGDNPYLKYNHADAEFQERLKEDTSFGGNLGRAVFQAKKRLLEPLGLVEEAAKTAPGKKRPVEQSPQEPDSSAGIGKSGAQPAKKRLNFGQTGDTESVPDPQPIGEPPAAPSGVGSLTMASGGGAPVADNNEGADGVGSSSGNWHCDSQWLGDRVITTSTRTWALPTYNNHLYKQISNSTSGGSSNDNAYFGYSTPWGYFDFNRFHCHFSPRDWQRLINNNWGFRPKRLNFKLFNIQVKEVTDNNGVKTIANNLTSTVQVFTDSDYQLPYVLGSAHEGCLPPFPADVFMIPQYGYLTLNDGSQAVGRSSFYCLEYFPSQMLRTGNNFQFSYEFENVPFHSSYAHSQSLDRLMNPLIDQYLYYLSRTINGSGQNQQTLKFSVAGPSNMAVQGRNYIPGPSYRQQRVSTTVTQNNNSEFAWPGASSWALNGRNSLMNPGPAMASHKEGEDRFFPLSGSLIFGKQGTGRDNVDADKVMITNEEEIKTTNPVATESYGQVATNHQSAQTLAVPFKAQAQTGWVQNQGILPGMVWQDRDVYLQGPIWAKIPHTDGNFHPSPLMGGFGMKHPPPQILIKNTPVPADPPTAFNKDKLNSFITQYSTGQVSVEIEWELQKENSKRWNPEIQYTSNYYKSNNVEFAVNTEGVYSEPRPIGTRYLTRNL

SEQ ID NO: 13 - protein, 743 aa, synthetic construct
MAADGYLPDWLEDNLSEGIREWWALKPGAPQPKANQQHQDNARGLVLPGYKYLGPGNGLDKGEPVNAADAAALEHDKAYDQQLKAGDNPYLKYNHADAEFQERLKEDTSFGGNLGRAVFQAKKRLLEPLGLVEEAAKTAPGKKRPVEQSPQEPDSSAGIGKSGAQPAKKRLNFGQTGDTESVPDPQPIGEPPAAPSGVGSLTMASGGGAPVADNNEGADGVGSSSGNWHCDSQWLGDRVITTSTRTWALPTYNNHLYKQISNSTSGGSSNDNAYFGYSTPWGYFDFNRFHCHFSPRDWQRLINNNWGFRPKRLNFKLFNIQVKEVTDNNGVKTIANNLTSTVQVFTDSDYQLPYVLGSAHEGCLPPFPADVFMIPQYGYLTLNDGSQAVGRSSFYCLEYFPSQMLRTGNNFQFSYEFENVPFHSSYAHSQSLDRLMNPLIDQYLYYLSRTINGSGQNQQTLKFSVAGPSNMAVQGRNYIPGPSYRQQRVSTTVTQNNNSEFAWPGASSWALNGRNSLMNPGPAMASHKEGEDRFFPLSGSLIFGKQGTGRDNVDADKVMITNEEEIKTTNPVATESYGQVATNHQSAQTLAVPFSNPAQTGWVQNQGILPGMVWQDRDVYLQGPIWAKIPHTDGNFHPSPLMGGFGMKHPPPQILIKNTPVPADPPTAFNKDKLNSFITQYSTGQVSVEIEWELQKENSKRWNPEIQYTSNYYKSNNVEFAVNTEGVYSEPRPIGTRYLTRNL

SEQ ID NO: 14 - protein, 738 aa, synthetic construct
MAADGYLPDWLEDNLSEGIREWWDLKPGAPKPKANQQKQDDGRGLVLPGYKYLGPFNGLDKGEPVNAADAAALEHDKAYDQQLKAGDNPYLRYNHADAEFQERLQEDTSFGGNLGRAVFQAKKRVLEPLGLVEEGAKTAPGKKRPVEPSPQRSPDSSTGIGKKGQQPAKKRLNFGQTGDSESVPDPQPIGEPPAGPSGLGSGTMAAGGGAPMADNNEGADGVGSSSGNWHCDSTWLGDRVITTSTRTWALPTYNNHLYKQISNGTSGGSTNDNTYFGYSTPWGYFDFNRFHCHFSPRDWQRLINNNWGFRPKRLNFKLFNIQVKEVTQNEGTKTIANNLTSTIQVFTDSEYQLPYVLGSAHQGCLPPFPADVFMIPQYGYLTLNNGSQAVGRSSFYCLEYFPSQMLRTGNNFEFSYQFEDVPFHSSYAHSQSLDRLMNPLIDQYLYYLSRTQSTGGTAGTQQLLFSQAGPNNMSAQAKNWLPGPCYRQQRVSTTLSQNNNSNFAWTGATKYHLNGRDSLVNPGVAMATHKDDEERFFPSSGVLMFGKQGAGKDNVDYSSVMLTSEEEIKTTNPVATEQYGVVADNLQQQNAAPIVGAVNSQGALPGMVWQNRDVYLQGPIWAKIPHTDGNFHPSPLMGGFGLKHPPPQILIKNTPVPADPPTTFSQAKLASFITQYSTGQVSVEIEWELQKENSKRWNPEIQYTSNYYKSTNVDFAVNTDGTYSEPRPIGTRYLTRNL

SEQ ID NO: 15 - DNA, 2217 bp, synthetic construct
  source 1..2217: mol_type = other DNA
atggctgccgatggttatcttccagattggctcgaggacaacctctctgagggcattcgcgagtggtgggacttgaaacctggagccccgaaacccaaagccaaccagcaaaagcaggacgacggccggggtctggtgcttcctggctacaagtacctcggacccttcaacggactcgacaagggggagcccgtcaacgcggcggacgcagcggccctcgagcacgacaaggcctacgaccagcagctcaaagcgggtgacaatccgtacctgcggtataaccacgccgacgccgagtttcaggagcgtctgcaagaagatacgtcttttgggggcaacctcgggcgagcagtcttccaggccaagaagcgggttctcgaacctctcggtctggttgaggaaggcgctaagacggctcctggaaagaagagaccggtagagccatcaccccagcgttctccagactcctctacgggcatcggcaagaaaggccagcagcccgcgaaaaagagactcaactttgggcagactggcgactcagagtcagtgcccgaccctcaaccaatcggagaaccccccgcaggcccctctggtctgggatctggtacaatggctgcaggcggtggcgctccaatggcagacaataacgaaggcgccgacggagtgggtagttcctcaggaaattggcattgcgattccacatggctgggcgacagagtcatcaccaccagcacccgaacctgggccctccccacctacaacaaccacctctacaagcaaatctccaacgggacttcgggaggaagcaccaacgacaacacctacttcggctacagcaccccctgggggtattttgactttaacagattccactgccacttctcaccacgtgactggcagcgactcatcaacaacaactggggattccggcccaagagactcaacttcaagctcttcaacatccaggtcaaggaggtcacgcagaatgaaggcaccaagaccatcgccaataaccttaccagcacgattcaggtctttacggactcggaataccagctcccgtacgtcctcggctctgcgcaccagggctgcctgcctccgttcccggcggacgtcttcatgattcctcagtacgggtacctgactctgaacaatggcagtcaggccgtgggccgttcctccttctactgcctggagtactttccttctcaaatgctgagaacgggcaacaactttgagttcagctaccagtttgaggacgtgccttttcacagcagctacgcgcacagccaaagcctggaccggctgatgaaccccctcatcgaccagtacctgtactacctgtctcggactcagtccacgggaggtaccgcaggaactcagcagttgctattttctcaggccgggcctaataacatgtcggctcaggccaaaaactggctacccgggccctgctaccggcagcaacgcgtctccacgacactgtcgcaaaataacaacagcaactttgcctggaccggtgccaccaagtatcatctgaatggcagagactctctggtaaatcccggtgtcgctatggcaacccacaaggacgacgaagagcgattttttccgtccagcggagtcttaatgtttgggaaacagggagctggaaaagacaacgtggactatagcagcgttatgctaaccagtgaggaagaaattaaaaccaccaacccagtggccacagaacagtacggcgtggtggccgataacctgcaacagcaaaacgccgctcctattgtaggggccgtcaacagtcaaggagccttacctggcatggtctggcagaaccgggacgtgtacctgcagggtcctatctgggccaagattcctcacacggacggaaactttcatccctcgccgctgatgggaggctttggactgaaacacccgcctcctcagatcctgattaagaatacacctgttcccgcggatcctccaactaccttcagtcaagctaagctggcgtcgttcatcacgcagtacagcaccggacaggtcagcgtggaaattgaatgggagctgcagaaagaaaacagcaaacgctggaacccagagattcaatacacttccaactactacaaatctacaaatgtggactttgctgttaacacagatggcacttattctgagcctcgccccatcggcacccgttacctcacccgtaatctgtaa

SEQ ID NO: 16 - protein, 735 aa, synthetic construct [sequence omitted]

SEQ ID NO: 17 - DNA, 2208 bp, synthetic construct
  source 1..2208: mol_type = other DNA
atggctgccgatggttatcttccagattggctcgaggacactctctctgaaggaataagacagtggtggaagctcaaacctggcccaccaccaccaaagcccgcagagcggcataaggacgacagcaggggtcttgtgcttcctgggtacaagtacctcggacccttcaacggactcgacaagggagagccggtcaacgaggcagacgccgcggccctcgagcacgacaaagcctacgaccggcagctcgacagcggagacaacccgtacctcaagtacaaccacgccgacgcggagtttcaggagcgccttaaagaagatacgtcttttgggggcaacctcggacgagcagtcttccaggcgaaaaagagggttcttgaacctctgggcctggttgaggaacctgttaagacggctccgggaaaaaagaggccggtagagcactctcctgtggagccagactcctcctcgggaaccggaaaggcgggccagcagcctgcaagaaaaagattgaattttggtcagactggagacgcagactcagtacctgacccccagcctctcggacagccaccagcagccccctctggtctgggaactaatacgatggctacaggcagtggcgcaccaatggcagacaataacgagggcgccgacggagtgggtaattcctcgggaaattggcattgcgattccacatggatgggcgacagagtcatcaccaccagcacccgaacctgggccctgcccacctacaacaaccacctctacaaacaaatttccagccaatcaggagcctcgaacgacaatcactactttggctacagcaccccttgggggtattttgacttcaacagattccactgccacttttcaccacgtgactggcaaagactcatcaacaacaactggggattccgacccaagagactcaacttcaagctctttaacattcaagtcaaagaggtcacgcagaatgacggtacgacgacgattgccaataaccttaccagcacggttcaggtgtttactgactcggagtaccagctcccgtacgtcctcggctcggcgcatcaaggatgcctcccgccgttcccagcagacgtcttcatggtgccacagtatggatacctcaccctgaacaacgggagtcaggcagtaggacgctcttcattttactgcctggagtactttccttctcagatgctgcgtaccggaaacaactttaccttcagctacacttttgaggacgttcctttccacagcagctacgctcacagccagagtctggaccgtctcatgaatcctctcatcgaccagtacctgtattacttgagcagaacaaacactccaagtggaaccaccacgcagtcaaggcttcagttttctcaggccggagcgagtgacattcgggaccagtctaggaactggcttcctggaccctgttaccgccagcagcgagtatcaaagacatctgcggataacaacaacagtgaatactcgtggactggagctaccaagtaccacctcaatggcagagactctctggtgaatccgggcccggccatggcaagccacaaggacgatgaagaaaagttttttcctcagagcggggttctcatctttgggaagcaaggctcagagaaaacaaatgtggacattgaaaaggtcatgattacagacgaagaggaaatcaggacaaccaatcccgtggctacggagcagtatggttctgtatctaccaacctccagagaggcaacagacaagcagctaccgcagatgtcaacacacaaggcgttcttccaggcatggtctggcaggacagagatgtgtaccttcaggggcccatctgggcaaagattccacacacggacggacattttcacccctctcccctcatgggtggattcggacttaaacaccctcctccacagattctcatcaagaacaccccggtacctgcgaatccttcgaccaccttcagtgcggcaaagtttgcttccttcatcacacagtactccacgggacaggtcagcgtggagatcgagtgggagctgcagaaggaaaacagcaaacgctggaatcccgaaattcagtacacttccaactacaacaagtctgttaatgtggactttactgtggacactaatggcgtgtattcagagcctcgccccattggcaccagatacctgactcgtaatctgtaa

SEQ ID NO: 18 - protein, 736 aa, synthetic construct
MAADGYLPDWLEDNLSEGIREWWDLKPGAPKPKANQQKQDDGRGLVLPGYKYLGPFNGLDKGEPVNAADAAALEHDKAYDQQLKAGDNPYLRYNHADAEFQERLQEDTSFGGNLGRAVFQAKKRVLEPLGLVEEGAKTAPGKKRPVEQSPQEPDSSSGIGKTGQQPAKKRLNFGQTGDSESVPDPQPLGEPPATPAAVGPTTMASGGGAPMADNNEGADGVGNASGNWHCDSTWLGDRVITTSTRTWALPTYNNHLYKQISSASTGASNDNHYFGYSTPWGYFDFNRFHCHFSPRDWQRLINNNWGFRPKRLNFKLFNIQVKEVTTNDGVTTIANNLTSTVQVFSDSEYQLPYVLGSAHQGCLPPFPADVFMIPQYGYLTLNNGSQAVGRSSFYCLEYFPSQMLRTGNNFTFSYTFEEVPFHSSYAHSQSLDRLMNPLIDQYLYYLNRTQNQSGSAQNKDLLFSRGSPAGMSVQPKNWLPGPCYRQQRVSKTKTDNNNSNFTWTGASKYNLNGRESIINPGTAMASHKDDEDKFFPMSGVMIFGKESAGASNTALDNVMITDEEEIKATNPVATERFGTVAVNFQSSSTDPATGDVHAMGALPGMVWQDRDVYLQGPIWAKIPHTDGHFHPSPLMGGFGLKNPPPQILIKNTPVPANPPAEFSATKFASFITQYSTGQVSVEIEWELQKENSKRWNPEVQYTSNYAKSANVDFTVDNNGLYTEPRPIGTRYLTRPL

SEQ ID NO: 19 - DNA, 2211 bp, synthetic construct
  source 1..2211: mol_type = other DNA
atggctgccgatggttatcttccagattggctcgaggacaacctctctgagggcattcgcgagtggtgggacttgaaacctggagccccgaagcccaaagccaaccagcaaaagcaggacgacggccggggtctggtgcttcctggctacaagtacctcggacccttcaacggactcgacaagggggagcccgtcaacgcggcggacgcagcggccctcgagcacgacaaggcctacgaccagcagctcaaagcgggtgacaatccgtacctgcggtataaccacgccgacgccgagtttcaggagcgtctgcaagaagatacgtcttttgggggcaacctcgggcgagcagtcttccaggccaagaagcgggttctcgaacctctcggtctggttgaggaaggcgctaagacggctcctggaaagaaacgtccggtagagcagtcgccacaagagccagactcctcctcgggcatcggcaagacaggccagcagcccgctaaaaagagactcaattttggtcagactggcgactcagagtcagtccccgatccacaacctctcggagaacctccagcaacccccgctgctgtgggacctactacaatggcttcaggcggtggcgcaccaatggcagacaataacgaaggcgccgacggagtgggtaatgcctcaggaaattggcattgcgattccacatggctgggcgacagagtcatcaccaccagcacccgcacctgggccttgcccacctacaataaccacctctacaagcaaatctccagtgcttcaacgggggccagcaacgacaaccactacttcggctacagcaccccctgggggtattttgatttcaacagattccactgccacttttcaccacgtgactggcagcgactcatcaacaacaattggggattccggcccaagagactcaacttcaaactcttcaacatccaagtcaaggaggtcacgacgaatgatggcgtcacaaccatcgctaataaccttaccagcacggttcaagtcttctcggactcggagtaccagcttccgtacgtcctcggctctgcgcaccagggctgcctccctccgttcccggcggacgtgttcatgattccgcaatacggctacctgacgctcaacaatggcagccaagccgtgggacgttcatccttttactgcctggaatatttcccttctcagatgctgagaacgggcaacaactttaccttcagctacacctttgaggaagtgcctttccacagcagctacgcgcacagccagagcctggaccggctgatgaatcctctcatcgaccaatacctgtattacctgaacagaactcaaaatcagtccggaagtgcccaaaacaaggacttgctgtttagccgtgggtctccagctggcatgtctgttcagcccaaaaactggctacctggaccctgttatcggcagcagcgcgtttctaaaacaaaaacagacaacaacaacagcaattttacctggactggtgcttcaaaatataacctcaatgggcgtgaatccatcatcaaccctggcactgctatggcctcacacaaagacgacgaagacaagttctttcccatgagcggtgtcatgatttttggaaaagagagcgccggagcttcaaacactgcattggacaatgtcatgattacagacgaagaggaaattaaagccactaaccctgtggccaccgaaagatttgggaccgtggcagtcaatttccagagcagcagcacagaccctgcgaccggagatgtgcatgctatgggagcattacctggcatggtgtggcaagatagagacgtgtacctgcagggtcccatttgggccaaaattcctcacacagatggacactttcacccgtctcctcttatgggcggctttggactcaagaacccgcctcctcagatcctcatcaaaaacacgcctgttcctgcgaatcctccggcggagttttcagctacaaagtttgcttcattcatcacccaatactccacaggacaagtgagtgtggaaattgaatgggagctgcagaaagaaaacagcaagcgctggaatcccgaagtgcagtacacatccaattatgcaaaatctgccaacgttgattttactgtggacaacaatggactttatactgagcctcgccccattggcacccgttaccttacccgtcccctgtaa

SEQ ID NO: 20 - protein, 724 aa, synthetic construct
MSFVDHPPDWLEEVGEGLREFLGLEAGPPKPKPNQQHQDQARGLVLPGYNYLGPGNGLDRGEPVNRADEVAREHDISYNEQLEAGDNPYLKYNHADAEFQEKLADDTSFGGNLGKAVFQAKKRVLEPFGLVEEGAKTAPTGKRIDDHFPKRKKARTEEDSKPSTSSDAEAGPSGSQQLQIPAQPASSLGADTMSAGGGGPLGDNNQGADGVGNASGDWHCDSTWMGDRVVTKSTRTWVLPSYNNHQYREIKSGSVDGSNANAYFGYSTPWGYFDFNRFHSHWSPRDWQRLINNYWGFRPRSLRVKIFNIQVKEVTVQDSTTTIANNLTSTVQVFTDDDYQLPYVVGNGTEGCLPAFPPQVFTLPQYGYATLNRDNTENPTERSSFFCLEYFPSKMLRTGNNFEFTYNFEEVPFHSSFAPSQNLFKLANPLVDQYLYRFVSTNNTGGVQFNKNLAGRYANTYKNWFPGPMGRTQGWNLGSGVNRASVSAFATTNRMELEGASYQVPPQPNGMTNNLQGSNTYALENTMIFNSQPANPGTTATYLEGNMLITSESETQPVNRVAYNVGGQMATNNQSSTTAPATGTYNLQEIVPGSVWMERDVYLQGPIWAKIPETGAHFHPSPAMGGFGLKHPPPMMLIKNTPVPGNITSFSDVPVSSFITQYSTGQVTVEMEWELKKENSKRWNPEIQYTNNYNDPQFVDFAPDSTGEYRTTRPIGTRYLTRPL

SEQ ID NO: 21 - DNA, 2175 bp, synthetic construct
  source 1..2175: mol_type = other DNA
atgtcttttgttgatcaccctccagattggttggaagaagttggtgaaggtcttcgcgagtttttgggccttgaagcgggcccaccgaaaccaaaacccaatcagcagcatcaagatcaagcccgtggtcttgtgctgcctggttataactatctcggacccggaaacggtctcgatcgaggagagcctgtcaacagggcagacgaggtcgcgcgagagcacgacatctcgtacaacgagcagcttgaggcgggagacaacccctacctcaagtacaaccacgcggacgccgagtttcaggagaagctcgccgacgacacatccttcgggggaaacctcggaaaggcagtctttcaggccaagaaaagggttctcgaaccttttggcctggttgaagagggtgctaagacggcccctaccggaaagcggatagacgaccactttccaaaaagaaagaaggcccggaccgaagaggactccaagccttccacctcgtcagacgccgaagctggacccagcggatcccagcagctgcaaatcccagcccaaccagcctcaagtttgggagctgatacaatgtctgcgggaggtggcggcccattgggcgacaataaccaaggtgccgatggagtgggcaatgcctcgggagattggcattgcgattccacgtggatgggggacagagtcgtcaccaagtccacccgaacctgggtgctgcccagctacaacaaccaccagtaccgagagatcaaaagcggctccgtcgacggaagcaacgccaacgcctactttggatacagcaccccctgggggtactttgactttaaccgcttccacagccactggagcccccgagactggcaaagactcatcaacaactactggggcttcagaccccggtccctcagagtcaaaatcttcaacattcaagtcaaagaggtcacggtgcaggactccaccaccaccatcgccaacaacctcacctccaccgtccaagtgtttacggacgacgactaccagctgccctacgtcgtcggcaacgggaccgagggatgcctgccggccttccctccgcaggtctttacgctgccgcagtacggttacgcgacgctgaaccgcgacaacacagaaaatcccaccgagaggagcagcttcttctgcctagagtactttcccagcaagatgctgagaacgggcaacaactttgagtttacctacaactttgaggaggtgcccttccactccagcttcgctcccagtcagaacctcttcaagctggccaacccgctggtggaccagtacttgtaccgcttcgtgagcacaaataacactggcggagtccagttcaacaagaacctggccgggagatacgccaacacctacaaaaactggttcccggggcccatgggccgaacccagggctggaacctgggctccggggtcaaccgcgccagtgtcagcgccttcgccacgaccaataggatggagctcgagggcgcgagttaccaggtgcccccgcagccgaacggcatgaccaacaacctccagggcagcaacacctatgccctggagaacactatgatcttcaacagccagccggcgaacccgggcaccaccgccacgtacctcgagggcaacatgctcatcaccagcgagagcgagacgcagccggtgaaccgcgtggcgtacaacgtcggcgggcagatggccaccaacaaccagagctccaccactgcccccgcgaccggcacgtacaacctccaggaaatcgtgcccggcagcgtgtggatggagagggacgtgtacctccaaggacccatctgggccaagatcccagagacgggggcgcactttcacccctctccggccatgggcggattcggactcaaacacccaccgcccatgatgctcatcaagaacacgcctgtgcccggaaatatcaccagcttctcggacgtgcccgtcagcagcttcatcacccagtacagcaccgggcaggtcaccgtggagatggagtgggagctcaagaaggaaaactccaagaggtggaacccagagatccagtacacaaacaactacaacgacccccagtttgtggactttgccccggacagcaccggggaatacagaaccaccagacctatcggaacccgataccttacccgacccctttaa

SEQ ID NO: 22 - DNA, 2226 bp, synthetic construct
  source 1..2226: mol_type = other DNA
atggctgccgatggttatcttccagattggctcgaggacaaccttagtgaaggaattcgcgagtggtgggctttgaaacctggagcccctcaacccaaggcaaatcaacaacatcaagacaacgctcgaggtcttgtgcttccgggttacaaataccttggacccggcaacggactcgacaagggggagccggtcaacgcagcagacgcggcggccctcgagcacgacaaggcctacgaccagcagctcaaggccggagacaacccgtacctcaagtacaaccacgccgacgccgagttccaggagcggctcaaagaagatacgtcttttgggggcaacctcgggcgagcagtcttccaggccaaaaagaggcttcttgaacctcttggtctggttgaggaagcggctaagacggctcctggaaagaagaggcctgtagagcagtctcctcaggaaccggactcctccgcgggtattggcaaatcgggtgcacagcccgctaaaaagagactcaatttcggtcagactggcgacacagagtcagtcccagaccctcaaccaatcggagaacctcccgcagccccctcaggtgtgggatctcttacaatggcttcaggtggtggcgcaccagtggcagacaataacgaaggtgccgatggagtgggtagttcctcgggaaattggcattgcgattcccaatggctgggggacagagtcatcaccaccagcacccgaacctgggccctgcccacctacaacaatcacctctacaagcaaatctccaacagcacatctggaggatcttcaaatgacaacgcctacttcggctacagcaccccctgggggtattttgacttcaacagattccactgccacttctcaccacgtgactggcagcgactcatcaacaacaactggggattccggcctaagcgactcaacttcaagctcttcaacattcaggtcaaagaggttacggacaacaatggagtcaagaccatcgccaataaccttaccagcacggtccaggtcttcacggactcagactatcagctcccgtacgtgctcgggtcggctcacgagggctgcctcccgccgttcccagcggacgttttcatgattcctcagtacgggtatctgacgcttaatgatggaagccaggccgtgggtcgttcgtccttttactgcctggaatatttcccgtcgcaaatgctaagaacgggtaacaacttccagttcagctacgagtttgagaacgtacctttccatagcagctacgctcacagccaaagcctggaccgactaatgaatccactcatcgatcagtatctgtattacttgagtaagacgcagcgtaagtctggttctccgcattctaaggcgcagaatcagcagacgttgaagttttcggtagctggtcctagcaacatggctgtccagggaagaaactacatacctggacccagctaccgacaacaacgtgtctcaaccactgtgactcaaaacaacaacagcgaatttgcttggcctggagcttcttcttgggctctcaatggacgtaatagcttgatgaatcctggacctgctatggccagccacaaagaaggagaggaccgtttctttcctttgtctggatctttaatttttggcaaacaaggaactggaagagacaacgtggatgcggacaaagtcatgataaccaacgaagaagaaattaaaactactaacccggtagcaacggagtcctatggacaagtggccacaaaccaccagagtgcccaagcacaggcgcagaccggctgggttcaaaaccaaggaatacttccgggtatggtttggcaggacagagatgtgtacctgcaaggacccatttgggccaaaattcctcacacggacggcaactttcacccttctccgctgatgggagggtttggaatgaagcacccgcctcctcagatcctcatcaaaaacacacctgtacctgcggatcctccaacggccttcaacaaggacaagctgaactctttcatcacccagtattctactggccaagtcagcgtggagatcgagtgggagctgcagaaggaaaacagcaagcgctggaacccggagatccagtacacttccaactattacaagtctaataatgttgaatttgctgttaatactgaaggtgtatatagtgaaccccgccccattggcacgcggtatttaacgaggaactta

SEQ ID NO: 23 - DNA, 2226 bp, synthetic construct
  source 1..2226: mol_type = other DNA
atggctgccgatggttatcttccagattggctcgaggacaaccttagtgaaggaattcgcgagtggtgggctttgaaacctggagcccctcaacccaaggcaaatcaacaacatcaagacaacgctcgaggtcttgtgcttccgggttacaaataccttggacccggcaacggactcgacaagggggagccggtcaacgcagcagacgcggcggccctcgagcacgacaaggcctacgaccagcagctcaaggccggagacaacccgtacctcaagtacaaccacgccgacgccgagttccaggagcggctcaaagaagatacgtcttttgggggcaacctcgggcgagcagtcttccaggccaaaaagaggcttcttgaacctcttggtctggttgaggaagcggctaagacggctcctggaaagaagaggcctgtagagcagtctcctcaggaaccggactcctccgcgggtattggcaaatcgggtgcacagcccgctaaaaagagactcaatttcggtcagactggcgacacagagtcagtcccagaccctcaaccaatcggagaacctcccgcagccccctcaggtgtgggatctcttacaatggcttcaggtggtggcgcaccagtggcagacaataacgaaggtgccgatggagtgggtagttcctcgggaaattggcattgcgattcccaatggctgggggacagagtcatcaccaccagcacccgaacctgggccctgcccacctacaacaatcacctctacaagcaaatctccaacagcacatctggaggatcttcaaatgacaacgcctacttcggctacagcaccccctgggggtattttgacttcaacagattccactgccacttctcaccacgtgactggcagcgactcatcaacaacaactggggattccggcctaagcgactcaacttcaagctcttcaacattcaggtcaaagaggttacggacaacaatggagtcaagaccatcgccaataaccttaccagcacggtccaggtcttcacggactcagactatcagctcccgtacgtgctcgggtcggctcacgagggctgcctcccgccgttcccagcggacgttttcatgattcctcagtacgggtatctgacgcttaatgatggaagccaggccgtgggtcgttcgtccttttactgcctggaatatttcccgtcgcaaatgctaagaacgggtaacaacttccagttcagctacgagtttgagaacgtacctttccatagcagctacgctcacagccaaagcctggaccgactaatgaatccactcatcgatcagtatctgtattacttgagtaagacgattaatggttctggttctccgcattctaaggcgcaggcgcgtaagacgttgaagttttcggtagctggtcctagcaacatggctgtccagggaagaaactacatacctggacccagctaccgacaacaacgtgtctcaaccactgtgactcaaaacaacaacagcgaatttgcttggcctggagcttcttcttgggctctcaatggacgtaatagcttgatgaatcctggacctgctatggccagccacaaagaaggagaggaccgtttctttcctttgtctggatctttaatttttggcaaacaaggaactggaagagacaacgtggatgcggacaaagtcatgataaccaacgaagaagaaattaaaactactaacccggtagcaacggagtcctatggacaagtggccacaaaccaccagagtgcccaagcacaggcgcagaccggctgggttcaaaaccaaggaatacttccgggtatggtttggcaggacagagatgtgtacctgcaaggacccatttgggccaaaattcctcacacggacggcaactttcacccttctccgctgatgggagggtttggaatgaagcacccgcctcctcagatcctcatcaaaaacacacctgtacctgcggatcctccaacggccttcaacaaggacaagctgaactctttcatcacccagtattctactggccaagtcagcgtggagatcgagtgggagctgcagaaggaaaacagcaagcgctggaacccggagatccagtacacttccaactattacaagtctaataatgttgaatttgctgttaatactgaaggtgtatatagtgaaccccgccccattggcacgcggtatttaacgaggaactta

SEQ ID NO: 24 - DNA, 2226 bp, synthetic construct
  source 1..2226: mol_type = other DNA
atggctgccgatggttatcttccagattggctcgaggacaaccttagtgaaggaattcgcgagtggtgggctttgaaacctggagcccctcaacccaaggcaaatcaacaacatcaagacaacgctcgaggtcttgtgcttccgggttacaaataccttggacccggcaacggactcgacaagggggagccggtcaacgcagcagacgcggcggccctcgagcacgacaaggcctacgaccagcagctcaaggccggagacaacccgtacctcaagtacaaccacgccgacgccgagttccaggagcggctcaaagaagatacgtcttttgggggcaacctcgggcgagcagtcttccaggccaaaaagaggcttcttgaacctcttggtctggttgaggaagcggctaagacggctcctggaaagaagaggcctgtagagcagtctcctcaggaaccggactcctccgcgggtattggcaaatcgggtgcacagcccgctaaaaagagactcaatttcggtcagactggcgacacagagtcagtcccagaccctcaaccaatcggagaacctcccgcagccccctcaggtgtgggatctcttacaatggcttcaggtggtggcgcaccagtggcagacaataacgaaggtgccgatggagtgggtagttcctcgggaaattggcattgcgattcccaatggctgggggacagagtcatcaccaccagcacccgaacctgggccctgcccacctacaacaatcacctctacaagcaaatctccaacagcacatctggaggatcttcaaatgacaacgcctacttcggctacagcaccccctgggggtattttgacttcaacagattccactgccacttctcaccacgtgactggcagcgactcatcaacaacaactggggattccggcctaagcgactcaacttcaagctcttcaacattcaggtcaaagaggttacggacaacaatggagtcaagaccatcgccaataaccttaccagcacggtccaggtcttcacggactcagactatcagctcccgtacgtgctcgggtcggctcacgagggctgcctcccgccgttcccagcggacgttttcatgattcctcagtacgggtatctgacgcttaatgatggaagccaggccgtgggtcgttcgtccttttactgcctggaatatttcccgtcgcaaatgctaagaacgggtaacaacttccagttcagctacgagtttgagaacgtacctttccatagcagctacgctcacagccaaagcctggaccgactaatgaatccactcatcgatcagtatctgtattacttgagtaagtatattgtgggttctggttctccgcattctaaggcgcagaatcagcagacgttgaagttttcggtagctggtcctagcaacatggctgtccagggaagaaactacatacctggacccagctaccgacaacaacgtgtctcaaccactgtgactcaaaacaacaacagcgaatttgcttggcctggagcttcttcttgggctctcaatggacgtaatagcttgatgaatcctggacctgctatggccagccacaaagaaggagaggaccgtttctttcctttgtctggatctttaatttttggcaaacaaggaactggaagagacaacgtggatgcggacaaagtcatgataaccaacgaagaagaaattaaaactactaacccggtagcaacggagtcctatggacaagtggccacaaaccaccagagtgcccaagcacaggcgcagaccggctgggttcaaaaccaaggaatacttccgggtatggtttggcaggacagagatgtgtacctgcaaggacccatttgggccaaaattcctcacacggacggcaactttcacccttctccgctgatgggagggtttggaatgaagcacccgcctcctcagatcctcatcaaaaacacacctgtacctgcggatcctccaacggccttcaacaaggacaagctgaactctttcatcacccagtattctactggccaagtcagcgtggagatcgagtgggagctgcagaaggaaaacagcaagcgctggaacccggagatccagtacacttccaactattacaagtctaataatgttgaatttgctgttaatactgaaggtgtatatagtgaaccccgccccattggcacgcggtatttaacgaggaactta

SEQ ID NO: 25 - DNA, 2226 bp, synthetic construct
  source 1..2226: mol_type = other DNA
atggctgccgatggttatcttccagattggctcgaggacaaccttagtgaaggaattcgcgagtggtgggctttgaaacctggagcccctcaacccaaggcaaatcaacaacatcaagacaacgctcgaggtcttgtgcttccgggttacaaataccttggacccggcaacggactcgacaagggggagccggtcaacgcagcagacgcggcggccctcgagcacgacaaggcctacgaccagcagctcaaggccggagacaacccgtacctcaagtacaaccacgccgacgccgagttccaggagcggctcaaagaagatacgtcttttgggggcaacctcgggcgagcagtcttccaggccaaaaagaggcttcttgaacctcttggtctggttgaggaagcggctaagacggctcctggaaagaagaggcctgtagagcagtctcctcaggaaccggactcctccgcgggtattggcaaatcgggtgcacagcccgctaaaaagagactcaatttcggtcagactggcgacacagagtcagtcccagaccctcaaccaatcggagaacctcccgcagccccctcaggtgtgggatctcttacaatggcttcaggtggtggcgcaccagtggcagacaataacgaaggtgccgatggagtgggtagttcctcgggaaattggcattgcgattcccaatggctgggggacagagtcatcaccaccagcacccgaacctgggccctgcccacctacaacaatcacctctacaagcaaatctccaacagcacatctggaggatcttcaaatgacaacgcctacttcggctacagcaccccctgggggtattttgacttcaacagattccactgccacttctcaccacgtgactggcagcgactcatcaacaacaactggggattccggcctaagcgactcaacttcaagctcttcaacattcaggtcaaagaggttacggacaacaatggagtcaagaccatcgccaataaccttaccagcacggtccaggtcttcacggactcagactatcagctcccgtacgtgctcgggtcggctcacgagggctgcctcccgccgttcccagcggacgttttcatgattcctcagtacgggtatctgacgcttaatgatggaagccaggccgtgggtcgttcgtccttttactgcctggaatatttcccgtcgcaaatgctaagaacgggtaacaacttccagttcagctacgagtttgagaacgtacctttccatagcagctacgctcacagccaaagcctggaccgactaatgaatccactcatcgatcagtatctgtattacttgagtaagacgatttctaagcgtggttctccgcattctaaggcgcagaatcagcagacgttgaagttttcggtagctggtcctagcaacatggctgtccagggaagaaactacatacctggacccagctaccgacaacaacgtgtctcaaccactgtgactcaaaacaacaacagcgaatttgcttggcctggagcttcttcttgggctctcaatggacgtaatagcttgatgaatcctggacctgctatggccagccacaaagaaggagaggaccgtttctttcctttgtctggatctttaatttttggcaaacaaggaactggaagagacaacgtggatgcggacaaagtcatgataaccaacgaagaagaaattaaaactactaacccggtagcaacggagtcctatggacaagtggccacaaaccaccagagtgcccaagcacaggcgcagaccggctgggttcaaaaccaaggaatacttccgggtatggtttggcaggacagagatgtgtacctgcaaggacccatttgggccaaaattcctcacacggacggcaactttcacccttctccgctgatgggagggtttggaatgaagcacccgcctcctcagatcctcatcaaaaacacacctgtacctgcggatcctccaacggccttcaacaaggacaagctgaactctttcatcacccagtattctactggccaagtcagcgtggagatcgagtgggagctgcagaaggaaaacagcaagcgctggaacccggagatccagtacacttccaactattacaagtctaataatgttgaatttgctgttaatactgaaggtgtatatagtgaaccccgccccattggcacgcggtatttaacgaggaactta

SEQ ID NO: 26 - DNA, 2226 bp, synthetic construct
  source 1..2226: mol_type = other DNA
atggctgccgatggttatcttccagattggctcgaggacaaccttagtgaaggaattcgcgagtggtgggctttgaaacctggagcccctcaacccaaggcaaatcaacaacatcaagacaacgctcgaggtcttgtgcttccgggttacaaataccttggacccggcaacggactcgacaagggggagccggtcaacgcagcagacgcggcggccctcgagcacgacaaggcctacgaccagcagctcaaggccggagacaacccgtacctcaagtacaaccacgccgacgccgagttccaggagcggctcaaagaagatacgtcttttgggggcaacctcgggcgagcagtcttccaggccaaaaagaggcttcttgaacctcttggtctggttgaggaagcggctaagacggctcctggaaagaagaggcctgtagagcagtctcctcaggaaccggactcctccgcgggtattggcaaatcgggtgcacagcccgctaaaaagagactcaatttcggtcagactggcgacacagagtcagtcccagaccctcaaccaatcggagaacctcccgcagccccctcaggtgtgggatctcttacaatggcttcaggtggtggcgcaccagtggcagacaataacgaaggtgccgatggagtgggtagttcctcgggaaattggcattgcgattcccaatggctgggggacagagtcatcaccaccagcacccgaacctgggccctgcccacctacaacaatcacctctacaagcaaatctccaacagcacatctggaggatcttcaaatgacaacgcctacttcggctacagcaccccctgggggtattttgacttcaacagattccactgccacttctcaccacgtgactggcagcgactcatcaacaacaactggggattccggcctaagcgactcaacttcaagctcttcaacattcaggtcaaagaggttacggacaacaatggagtcaagaccatcgccaataaccttaccagcacggtccaggtcttcacggactcagactatcagctcccgtacgtgctcgggtcggctcacgagggctgcctcccgccgttcccagcggacgttttcatgattcctcagtacgggtatctgacgcttaatgatggaagccaggccgtgggtcgttcgtccttttactgcctggaatatttcccgtcgcaaatgctaagaacgggtaacaacttccagttcagctacgagtttgagaacgtacctttccatagcagctacgctcacagccaaagcctggaccgactaatgaatccactcatcgatcagtatctgtattacttgagtaagggtctgggtggttctggttctccgcattctaaggcgcagaatcagcagacgttgaagttttcggtagctggtcctagcaacatggctgtccagggaagaaactacatacctggacccagctaccgacaacaacgtgtctcaaccactgtgactcaaaacaacaacagcgaatttgcttggcctggagcttcttcttgggctctcaatggacgtaatagcttgatgaatcctggacctgctatggccagccacaaagaaggagaggaccgtttctttcctttgtctggatctttaatttttggcaaacaaggaactggaagagacaacgtggatgcggacaaagtcatgataaccaacgaagaagaaattaaaactactaacccggtagcaacggagtcctatggacaagtggccacaaaccaccagagtgcccaagcacaggcgcagaccggctgggttcaaaaccaaggaatacttccgggtatggtttggcaggacagagatgtgtacctgcaaggacccatttgggccaaaattcctcacacggacggcaactttcacccttctccgctgatgggagggtttggaatgaagcacccgcctcctcagatcctcatcaaaaacacacctgtacctgcggatcctccaacggccttcaacaaggacaagctgaactctttcatcacccagtattctactggccaagtcagcgtggagatcgagtgggagctgcagaaggaaaacagcaagcgctggaacccggagatccagtacacttccaactattacaagtctaataatgttgaatttgctgttaatactgaaggtgtatatagtgaaccccgccccattggcacgcggtatttaacgaggaactta

SEQ ID NO: 27 - DNA, 2226 bp, synthetic construct
  source 1..2226: mol_type = other DNA
atggctgccgatggttatcttccagattggctcgaggacaaccttagtgaaggaattcgcgagtggtgggctttgaaacctggagcccctcaacccaaggcaaatcaacaacatcaagacaacgctcgaggtcttgtgcttccgggttacaaataccttggacccggcaacggactcgacaagggggagccggtcaacgcagcagacgcggcggccctcgagcacgacaaggcctacgaccagcagctcaaggccggagacaacccgtacctcaagtacaaccacgccgacgccgagttccaggagcggctcaaagaagatacgtcttttgggggcaacctcgggcgagcagtcttccaggccaaaaagaggcttcttgaacctcttggtctggttgaggaagcggctaagacggctcctggaaagaagaggcctgtagagcagtctcctcaggaaccggactcctccgcgggtattggcaaatcgggtgcacagcccgctaaaaagagactcaatttcggtcagactggcgacacagagtcagtcccagaccctcaaccaatcggagaacctcccgcagccccctcaggtgtgggatctcttacaatggcttcaggtggtggcgcaccagtggcagacaataacgaaggtgccgatggagtgggtagttcctcgggaaattggcattgcgattcccaatggctgggggacagagtcatcaccaccagcacccgaacctgggccctgcccacctacaacaatcacctctacaagcaaatctccaacagcacatctggaggatcttcaaatgacaacgcctacttcggctacagcaccccctgggggtattttgacttcaacagattccactgccacttctcaccacgtgactggcagcgactcatcaacaacaactggggattccggcctaagcgactcaacttcaagctcttcaacattcaggtcaaagaggttacggacaacaatggagtcaagaccatcgccaataaccttaccagcacggtccaggtcttcacggactcagactatcagctcccgtacgtgctcgggtcggctcacgagggctgcctcccgccgttcccagcggacgttttcatgattcctcagtacgggtatctgacgcttaatgatggaagccaggccgtgggtcgttcgtccttttactgcctggaatatttcccgtcgcaaatgctaagaacgggtaacaacttccagttcagctacgagtttgagaacgtacctttccatagcagctacgctcacagccaaagcctggaccgactaatgaatccactcatcgatcagtatctgtattacttgagtaagacgattaatggtcatgattctccgcattctaaggcgcagaatctgcagacgttgaagttttcggtagctggtcctagcaacatggctgtccagggaagaaactacatacctggacccagctaccgacaacaacgtgtctcaaccactgtgactcaaaacaacaacagcgaatttgcttggcctggagcttcttcttgggctctcaatggacgtaatagcttgatgaatcctggacctgctatggccagccacaaagaaggagaggaccgtttctttcctttgtctggatctttaatttttggcaaacaaggaactggaagagacaacgtggatgcggacaaagtcatgataaccaacgaagaagaaattaaaactactaacccggtagcaacggagtcctatggacaagtggccacaaaccaccagagtgcccaagcacaggcgcagaccggctgggttcaaaaccaaggaatacttccgggtatggtttggcaggacagagatgtgtacctgcaaggacccatttgggccaaaattcctcacacggacggcaactttcacccttctccgctgatgggagggtttggaatgaagcacccgcctcctcagatcctcatcaaaaacacacctgtacctgcggatcctccaacggccttcaacaaggacaagctgaactctttcatcacccagtattctactggccaagtcagcgtggagatcgagtgggagctgcagaaggaaaacagcaagcgctggaacccggagatccagtacacttccaactattacaagtctaataatgttgaatttgctgttaatactgaaggtgtatatagtgaaccccgccccattggcacgcggtatttaacgaggaactta

SEQ ID NO: 28 - DNA, 2226 bp, synthetic construct
  source 1..2226: mol_type = other DNA
atggctgccgatggttatcttccagattggctcgaggacaaccttagtgaaggaattcgcgagtggtgggctttgaaacctggagcccctcaacccaaggcaaatcaacaacatcaagacaacgctcgaggtcttgtgcttccgggttacaaataccttggacccggcaacggactcgacaagggggagccggtcaacgcagcagacgcggcggccctcgagcacgacaaggcctacgaccagcagctcaaggccggagacaacccgtacctcaagtacaaccacgccgacgccgagttccaggagcggctcaaagaagatacgtcttttgggggcaacctcgggcgagcagtcttccaggccaaaaagaggcttcttgaacctcttggtctggttgaggaagcggctaagacggctcctggaaagaagaggcctgtagagcagtctcctcaggaaccggactcctccgcgggtattggcaaatcgggtgcacagcccgctaaaaagagactcaatttcggtcagactggcgacacagagtcagtcccagaccctcaaccaatcggagaacctcccgcagccccctcaggtgtgggatctcttacaatggcttcaggtggtggcgcaccagtggcagacaataacgaaggtgccgatggagtgggtagttcctcgggaaattggcattgcgattcccaatggctgggggacagagtcatcaccaccagcacccgaacctgggccctgcccacctacaacaatcacctctacaagcaaatctccaacagcacatctggaggatcttcaaatgacaacgcctacttcggctacagcaccccctgggggtattttgacttcaacagattccactgccacttctcaccacgtgactggcagcgactcatcaacaacaactggggattccggcctaagcgactcaacttcaagctcttcaacattcaggtcaaagaggttacggacaacaatggagtcaagaccatcgccaataaccttaccagcacggtccaggtcttcacggactcagactatcagctcccgtacgtgctcgggtcggctcacgagggctgcctcccgccgttcccagcggacgttttcatgattcctcagtacgggtatctgacgcttaatgatggaagccaggccgtgggtcgttcgtccttttactgcctggaatatttcccgtcgcaaatgctaagaacgggtaacaacttccagttcagctacgagtttgagaacgtacctttccatagcagctacgctcacagccaaagcctggaccgactaatgaatccactcatcgatcagtatctgtattacttgagtaagacggtgaatggtcatgattctccgcattctaaggcgcagaatcagcagacgttgaagttttcggtagctggtcctagcaacatggctgtccagggaagaaactacatacctggacccagctaccgacaacaacgtgtctcaaccactgtgactcaaaacaacaacagcgaatttgcttggcctggagcttcttcttgggctctcaatggacgtaatagcttgatgaatcctggacctgctatggccagccacaaagaaggagaggaccgtttctttcctttgtctggatctttaatttttggcaaacaaggaactggaagagacaacgtggatgcggacaaagtcatgataaccaacgaagaagaaattaaaactactaacccggtagcaacggagtcctatggacaagtggccacaaaccaccagagtgcccaagcacaggcgcagaccggctgggttcaaaaccaaggaatacttccgggtatggtttggcaggacagagatgtgtacctgcaaggacccatttgggccaaaattcctcacacggacggcaactttcacccttctccgctgatgggagggtttggaatgaagcacccgcctcctcagatcctcatcaaaaacacacctgtacctgcggatcctccaacggccttcaacaaggacaagctgaactctttcatcacccagtattctactggccaagtcagcgtggagatcgagtgggagctgcagaaggaaaacagcaagcgctggaacccggagatccagtacacttccaactattacaagtctaataatgttgaatttgctgttaatactgaaggtgtatatagtgaaccccgccccattggcacgcggtatttaacgaggaactta

SEQ ID NO: 29 - DNA, 2226 bp, synthetic construct
  source 1..2226: mol_type = other DNA
atggctgccgatggttatcttccagattggctcgaggacaaccttagtgaaggaattcgcgagtggtgggctttgaaacctggagcccctcaacccaaggcaaatcaacaacatcaagacaacgctcgaggtcttgtgcttccgggttacaaataccttggacccggcaacggactcgacaagggggagccggtcaacgcagcagacgcggcggccctcgagcacgacaaggcctacgaccagcagctcaaggccggagacaacccgtacctcaagtacaaccacgccgacgccgagttccaggagcggctcaaagaagatacgtcttttgggggcaacctcgggcgagcagtcttccaggccaaaaagaggcttcttgaacctcttggtctggttgaggaagcggctaagacggctcctggaaagaagaggcctgtagagcagtctcctcaggaaccggactcctccgcgggtattggcaaatcgggtgcacagcccgctaaaaagagactcaatttcggtcagactggcgacacagagtcagtcccagaccctcaaccaatcggagaacctcccgcagccccctcaggtgtgggatctcttacaatggcttcaggtggtggcgcaccagtggcagacaataacgaaggtgccgatggagtgggtagttcctcgggaaattggcattgcgattcccaatggctgggggacagagtcatcaccaccagcacccgaacctgggccctgcccacctacaacaatcacctctacaagcaaatctccaacagcacatctggaggatcttcaaatgacaacgcctacttcggctacagcaccccctgggggtattttgacttcaacagattccactgccacttctcaccacgtgactggcagcgactcatcaacaacaactggggattccggcctaagcgactcaacttcaagctcttcaacattcaggtcaaagaggttacggacaacaatggagtcaagaccatcgccaataaccttaccagcacggtccaggtcttcacggactcagactatcagctcccgtacgtgctcgggtcggctcacgagggctgcctcccgccgttcccagcggacgttttcatgattcctcagtacgggtatctgacgcttaatgatggaagccaggccgtgggtcgttcgtccttttactgcctggaatatttcccgtcgcaaatgctaagaacgggtaacaacttccagttcagctacgagtttgagaacgtacctttccatagcagctacgctcacagccaaagcctggaccgactaatgaatccactcatcgatcagtatctgtattacttgagtaagacgattaatggtcatgattctccgcattctaaggcgctgaatcagcagacgttgaagttttcggtagctggtcctagcaacatggctgtccagggaagaaactacatacctggacccagctaccgacaacaacgtgtctcaaccactgtgactcaaaacaacaacagcgaatttgcttggcctggagcttcttcttgggctctcaatggacgtaatagcttgatgaatcctggacctgctatggccagccacaaagaaggagaggaccgtttctttcctttgtctggatctttaatttttggcaaacaaggaactggaagagacaacgtggatgcggacaaagtcatgataaccaacgaagaagaaattaaaactactaacccggtagcaacggagtcctatggacaagtggccacaaaccaccagagtgcccaagcacaggcgcagaccggctgggttcaaaaccaaggaatacttccgggtatggtttggcaggacagagatgtgtacctgcaaggacccatttgggccaaaattcctcacacggacggcaactttcacccttctccgctgatgggagggtttggaatgaagcacccgcctcctcagatcctcatcaaaaacacacctgtacctgcggatcctccaacggccttcaacaaggacaagctgaactctttcatcacccagtattctactggccaagtcagcgtggagatcgagtgggagctgcagaaggaaaacagcaagcgctggaacccggagatccagtacacttccaactattacaagtctaataatgttgaatttgctgttaatactgaaggtgtatatagtgaaccccgccccattggcacgcggtatttaacgaggaactta

SEQ ID NO: 30 - DNA, 2226 bp, synthetic construct
  source 1..2226: mol_type = other DNA
atggctgccgatggttatcttccagattggctcgaggacaaccttagtgaaggaattcgcgagtggtgggctttgaaacctggagcccctcaacccaaggcaaatcaacaacatcaagacaacgctcgaggtcttgtgcttccgggttacaaataccttggacccggcaacggactcgacaagggggagccggtcaacgcagcagacgcggcggccctcgagcacgacaaggcctacgaccagcagctcaaggccggagacaacccgtacctcaagtacaaccacgccgacgccgagttccaggagcggctcaaagaagatacgtcttttgggggcaacctcgggcgagcagtcttccaggccaaaaagaggcttcttgaacctcttggtctggttgaggaagcggctaagacggctcctggaaagaagaggcctgtagagcagtctcctcaggaaccggactcctccgcgggtattggcaaatcgggtgcacagcccgctaaaaagagactcaatttcggtcagactggcgacacagagtcagtcccagaccctcaaccaatcggagaacctcccgcagccccctcaggtgtgggatctcttacaatggcttcaggtggtggcgcaccagtggcagacaataacgaaggtgccgatggagtgggtagttcctcgggaaattggcattgcgattcccaatggctgggggacagagtcatcaccaccagcacccgaacctgggccctgcccacctacaacaatcacctctacaagcaaatctccaacagcacatctggaggatcttcaaatgacaacgcctacttcggctacagcaccccctgggggtattttgacttcaacagattccactgccacttctcaccacgtgactggcagcgactcatcaacaacaactggggattccggcctaagcgactcaacttcaagctcttcaacattcaggtcaaagaggttacggacaacaatggagtcaagaccatcgccaataaccttaccagcacggtccaggtcttcacggactcagactatcagctcccgtacgtgctcgggtcggctcacgagggctgcctcccgccgttcccagcggacgttttcatgattcctcagtacgggtatctgacgcttaatgatggaagccaggccgtgggtcgttcgtccttttactgcctggaatatttcccgtcgcaaatgctaagaacgggtaacaacttccagttcagctacgagtttgagaacgtacctttccatagcagctacgctcacagccaaagcctggaccgactaatgaatccactcatcgatcagtatctgtattacttgagtaagacgattaatggtcatgattctccgcattctaaggcgcagaatcagcagtctttgaagttttcggtagctggtcctagcaacatggctgtccagggaagaaactacatacctggacccagctaccgacaacaacgtgtctcaaccactgtgactcaaaacaacaacagcgaatttgcttggcctggagcttcttcttgggctctcaatggacgtaatagcttgatgaatcctggacctgctatggccagccacaaagaaggagaggaccgtttctttcctttgtctggatctttaatttttggcaaacaaggaactggaagagacaacgtggatgcggacaaagtcatgataaccaacgaagaagaaattaaaactactaacccggtagcaacggagtcctatggacaagtggccacaaaccaccagagtgcccaagcacaggcgcagaccggctgggttcaaaaccaaggaatacttccgggtatggtttggcaggacagagatgtgtacctgcaaggacccatttgggccaaaattcctcacacggacggcaactttcacccttctccgctgatgggagggtttggaatgaagcacccgcctcctcagatcctcatcaaaaacacacctgtacctgcggatcctccaacggccttcaacaaggacaagctgaactctttcatcacccagtattctactggccaagtcagcgtggagatcgagtgggagctgcagaaggaaaacagcaagcgctggaacccggagatccagtacacttccaactattacaagtctaataatgttgaatttgctgttaatactgaaggtgtatatagtgaaccccgccccattggcacgcggtatttaacgaggaactta

SEQ ID NO: 31 - DNA, 2226 bp, synthetic construct
  source 1..2226: mol_type = other DNA
atggctgccgatggttatcttccagattggctcgaggacaaccttagtgaaggaattcgcgagtggtgggctttgaaacctggagcccctcaacccaaggcaaatcaacaacatcaagacaacgctcgaggtcttgtgcttccgggttacaaataccttggacccggcaacggactcgacaagggggagccggtcaacgcagcagacgcggcggccctcgagcacgacaaggcctacgaccagcagctcaaggccggagacaacccgtacctcaagtacaaccacgccgacgccgagttccaggagcggctcaaagaagatacgtcttttgggggcaacctcgggcgagcagtcttccaggccaaaaagaggcttcttgaacctcttggtctggttgaggaagcggctaagacggctcctggaaagaagaggcctgtagagcagtctcctcaggaaccggactcctccgcgggtattggcaaatcgggtgcacagcccgctaaaaagagactcaatttcggtcagactggcgacacagagtcagtcccagaccctcaaccaatcggagaacctcccgcagccccctcaggtgtgggatctcttacaatggcttcaggtggtggcgcaccagtggcagacaataacgaaggtgccgatggagtgggtagttcctcgggaaattggcattgcgattcccaatggctgggggacagagtcatcaccaccagcacccgaacctgggccctgcccacctacaacaatcacctctacaagcaaatctccaacagcacatctggaggatcttcaaatgacaacgcctacttcggctacagcaccccctgggggtattttgacttcaacagattccactgccacttctcaccacgtgactggcagcgactcatcaacaacaactggggattccggcctaagcgactcaacttcaagctcttcaacattcaggtcaaagaggttacggacaacaatggagtcaagaccatcgccaataaccttaccagcacggtccaggtcttcacggactcagactatcagctcccgtacgtgctcgggtcggctcacgagggctgcctcccgccgttcccagcggacgttttcatgattcctcagtacgggtatctgacgcttaatgatggaagccaggccgtgggtcgttcgtccttttactgcctggaatatttcccgtcgcaaatgctaagaacgggtaacaacttccagttcagctacgagtttgagaacgtacctttccatagcagctacgctcacagccaaagcctggaccgactaatgaatccactcatcgatcagtatctgtattacttgagtaagacgattaatggtcatgattctccgcattctaaggcgcagaatcagcagattttgaagttttcggtagctggtcctagcaacatggctgtccagggaagaaactacatacctggacccagctaccgacaacaacgtgtctcaaccactgtgactcaaaacaacaacagcgaatttgcttggcctggagcttcttcttgggctctcaatggacgtaatagcttgatgaatcctggacctgctatggccagccacaaagaaggagaggaccgtttctttcctttgtctggatctttaatttttggcaaacaaggaactggaagagacaacgtggatgcggacaaagtcatgataaccaacgaagaagaaattaaaactactaacccggtagcaacggagtcctatggacaagtggccacaaaccaccagagtgcccaagcacaggcgcagaccggctgggttcaaaaccaaggaatacttccgggtatggtttggcaggacagagatgtgtacctgcaaggacccatttgggccaaaattcctcacacggacggcaactttcacccttctccgctgatgggagggtttggaatgaagcacccgcctcctcagatcctcatcaaaaacacacctgtacctgcggatcctccaacggccttcaacaaggacaagctgaactctttcatcacccagtattctactggccaagtcagcgtggagatcgagtgggagctgcagaaggaaaacagcaagcgctggaacccggagatccagtacacttccaactattacaagtctaataatgttgaatttgctgttaatactgaaggtgtatatagtgaaccccgccccattggcacgcggtatttaacgaggaactta

SEQ ID NO: 32 - DNA, 2226 bp, synthetic construct
  source 1..2226: mol_type = other DNA
atggctgccgatggttatcttccagattggctcgaggacaaccttagtgaaggaattcgcgagtggtgggctttgaaacctggagcccctcaacccaaggcaaatcaacaacatcaagacaacgctcgaggtcttgtgcttccgggttacaaataccttggacccggcaacggactcgacaagggggagccggtcaacgcagcagacgcggcggccctcgagcacgacaaggcctacgaccagcagctcaaggccggagacaacccgtacctcaagtacaaccacgccgacgccgagttccaggagcggctcaaagaagatacgtcttttgggggcaacctcgggcgagcagtcttccaggccaaaaagaggcttcttgaacctcttggtctggttgaggaagcggctaagacggctcctggaaagaagaggcctgtagagcagtctcctcaggaaccggactcctccgcgggtattggcaaatcgggtgcacagcccgctaaaaagagactcaatttcggtcagactggcgacacagagtcagtcccagaccctcaaccaatcggagaacctcccgcagccccctcaggtgtgggatctcttacaatggcttcaggtggtggcgcaccagtggcagacaataacgaaggtgccgatggagtgggtagttcctcgggaaattggcattgcgattcccaatggctgggggacagagtcatcaccaccagcacccgaacctgggccctgcccacctacaacaatcacctctacaagcaaatctccaacagcacatctggaggatcttcaaatgacaacgcctacttcggctacagcaccccctgggggtattttgacttcaacagattccactgccacttctcaccacgtgactggcagcgactcatcaacaacaactggggattccggcctaagcgactcaacttcaagctcttcaacattcaggtcaaagaggttacggacaacaatggagtcaagaccatcgccaataaccttaccagcacggtccaggtcttcacggactcagactatcagctcccgtacgtgctcgggtcggctcacgagggctgcctcccgccgttcccagcggacgttttcatgattcctcagtacgggtatctgacgcttaatgatggaagccaggccgtgggtcgttcgtccttttactgcctggaatatttcccgtcgcaaatgctaagaacgggtaacaacttccagttcagctacgagtttgagaacgtacctttccatagcagctacgctcacagccaaagcctggaccgactaatgaatccactcatcgatcagtatctgtattacttgagtaagacgattaatggttctggttctccgcattttacgcgtcagaatcagcagacgttgaagttttcggtagctggtcctagcaacatggctgtccagggaagaaactacatacctggacccagctaccgacaacaacgtgtctcaaccactgtgactcaaaacaacaacagcgaatttgcttggcctggagcttcttcttgggctctcaatggacgtaatagcttgatgaatcctggacctgctatggccagccacaaagaaggagaggaccgtttctttcctttgtctggatctttaatttttggcaaacaaggaactggaagagacaacgtggatgcggacaaagtcatgataaccaacgaagaagaaattaaaactactaacccggtagcaacggagtcctatggacaagtggccacaaaccaccagagtgcccaagcacaggcgcagaccggctgggttcaaaaccaaggaatacttccgggtatggtttggcaggacagagatgtgtacctgcaaggacccatttgggccaaaattcctcacacggacggcaactttcacccttctccgctgatgggagggtttggaatgaagcacccgcctcctcagatcctcatcaaaaacacacctgtacctgcggatcctccaacggccttcaacaaggacaagctgaactctttcatcacccagtattctactggccaagtcagcgtggagatcgagtgggagctgcagaaggaaaacagcaagcgctggaacccggagatccagtacacttccaactattacaagtctaataatgttgaatttgctgttaatactgaaggtgtatatagtgaaccccgccccattggcacgcggtatttaacgaggaactta

SEQ ID NO: 33 - DNA, 2226 bp, synthetic construct
  source 1..2226: mol_type = other DNA
atggctgccgatggttatcttccagattggctcgaggacaaccttagtgaaggaattcgcgagtggtgggctttgaaacctggagcccctcaacccaaggcaaatcaacaacatcaagacaacgctcgaggtcttgtgcttccgggttacaaataccttggacccggcaacggactcgacaagggggagccggtcaacgcagcagacgcggcggccctcgagcacgacaaggcctacgaccagcagctcaaggccggagacaacccgtacctcaagtacaaccacgccgacgccgagttccaggagcggctcaaagaagatacgtcttttgggggcaacctcgggcgagcagtcttccaggccaaaaagaggcttcttgaacctcttggtctggttgaggaagcggctaagacggctcctggaaagaagaggcctgtagagcagtctcctcaggaaccggactcctccgcgggtattggcaaatcgggtgcacagcccgctaaaaagagactcaatttcggtcagactggcgacacagagtcagtcccagaccctcaaccaatcggagaacctcccgcagccccctcaggtgtgggatctcttacaatggcttcaggtggtggcgcaccagtggcagacaataacgaaggtgccgatggagtgggtagttcctcgggaaattggcattgcgattcccaatggctgggggacagagtcatcaccaccagcacccgaacctgggccctgcccacctacaacaatcacctctacaagcaaatctccaacagcacatctggaggatcttcaaatgacaacgcctacttcggctacagcaccccctgggggtattttgacttcaacagattccactgccacttctcaccacgtgactggcagcgactcatcaacaacaactggggattccggcctaagcgactcaacttcaagctcttcaacattcaggtcaaagaggttacggacaacaatggagtcaagaccatcgccaataaccttaccagcacggtccaggtcttcacggactcagactatcagctcccgtacgtgctcgggtcggctcacgagggctgcctcccgccgttcccagcggacgttttcatgattcctcagtacgggtatctgacgcttaatgatggaagccaggccgtgggtcgttcgtccttttactgcctggaatatttcccgtcgcaaatgctaagaacgggtaacaacttccagttcagctacgagtttgagaacgtacctttccatagcagctacgctcacagccaaagcctggaccgactaatgaatccactcatcgatcagtatctgtattacttgagtaagacgtctaatggtcatgattctccgcattctaaggcgcagaatcagcagacgttgaagttttcggtagctggtcctagcaacatggctgtccagggaagaaactacatacctggacccagctaccgacaacaacgtgtctcaaccactgtgactcaaaacaacaacagcgaatttgcttggcctggagcttcttcttgggctctcaatggacgtaatagcttgatgaatcctggacctgctatggccagccacaaagaaggagaggaccgtttctttcctttgtctggatctttaatttttggcaaacaaggaactggaagagacaacgtggatgcggacaaagtcatgataaccaacgaagaagaaattaaaactactaacccggtagcaacggagtcctatggacaagtggccacaaaccaccagagtgcccaagcacaggcgcagaccggctgggttcaaaaccaaggaatacttccgggtatggtttggcaggacagagatgtgtacctgcaaggacccatttgggccaaaattcctcacacggacggcaactttcacccttctccgctgatgggagggtttggaatgaagcacccgcctcctcagatcctcatcaaaaacacacctgtacctgcggatcctccaacggccttcaacaaggacaagctgaactctttcatcacccagtattctactggccaagtcagcgtggagatcgagtgggagctgcagaaggaaaacagcaagcgctggaacccggagatccagtacacttccaactattacaagtctaataatgttgaatttgctgttaatactgaaggtgtatatagtgaaccccgccccattggcacgcggtatttaacgaggaactta

SEQ ID NO: 34 - DNA, 2226 bp, synthetic construct
  source 1..2226: mol_type = other DNA
atggctgccgatggttatcttccagattggctcgaggacaaccttagtgaaggaattcgcgagtggtgggctttgaaacctggagcccctcaacccaaggcaaatcaacaacatcaagacaacgctcgaggtcttgtgcttccgggttacaaataccttggacccggcaacggactcgacaagggggagccggtcaacgcagcagacgcggcggccctcgagcacgacaaggcctacgaccagcagctcaaggccggagacaacccgtacctcaagtacaaccacgccgacgccgagttccaggagcggctcaaagaagatacgtcttttgggggcaacctcgggcgagcagtcttccaggccaaaaagaggcttcttgaacctcttggtctggttgaggaagcggctaagacggctcctggaaagaagaggcctgtagagcagtctcctcaggaaccggactcctccgcgggtattggcaaatcgggtgcacagcccgctaaaaagagactcaatttcggtcagactggcgacacagagtcagtcccagaccctcaaccaatcggagaacctcccgcagccccctcaggtgtgggatctcttacaatggcttcaggtggtggcgcaccagtggcagacaataacgaaggtgccgatggagtgggtagttcctcgggaaattggcattgcgattcccaatggctgggggacagagtcatcaccaccagcacccgaacctgggccctgcccacctacaacaatcacctctacaagcaaatctccaacagcacatctggaggatcttcaaatgacaacgcctacttcggctacagcaccccctgggggtattttgacttcaacagattccactgccacttctcaccacgtgactggcagcgactcatcaacaacaactggggattccggcctaagcgactcaacttcaagctcttcaacattcaggtcaaagaggttacggacaacaatggagtcaagaccatcgccaataaccttaccagcacggtccaggtcttcacggactcagactatcagctcccgtacgtgctcgggtcggctcacgagggctgcctcccgccgttcccagcggacgttttcatgattcctcagtacgggtatctgacgcttaatgatggaagccaggccgtgggtcgttcgtccttttactgcctggaatatttcccgtcgcaaatgctaagaacgggtaacaacttccagttcagctacgagtttgagaacgtacctttccatagcagctacgctcacagccaaagcctggaccgactaatgaatccactcatcgatcagtatctgtattacttgagtaagacgattaatggttctggttctccgcattctctgccgtggaatcagcagacgttgaagttttcggtagctggtcctagcaacatggctgtccagggaagaaactacatacctggacccagctaccgacaacaacgtgtctcaaccactgtgactcaaaacaacaacagcgaatttgcttggcctggagcttcttcttgggctctcaatggacgtaatagcttgatgaatcctggacctgctatggccagccacaaagaaggagaggaccgtttctttcctttgtctggatctttaatttttggcaaacaaggaactggaagagacaacgtggatgcggacaaagtcatgataaccaacgaagaagaaattaaaactactaacccggtagcaacggagtcctatggacaagtggccacaaaccaccagagtgcccaagcacaggcgcagaccggctgggttcaaaaccaaggaatacttccgggtatggtttggcaggacagagatgtgtacctgcaaggacccatttgggccaaaattcctcacacggacggcaactttcacccttctccgctgatgggagggtttggaatgaagcacccgcctcctcagatcctcatcaaaaacacacctgtacctgcggatcctccaacggccttcaacaaggacaagctgaactctttcatcacccagtattctactggccaagtcagcgtggagatcgagtgggagctgcagaaggaaaacagcaagcgctggaacccggagatccagtacacttccaactattacaagtctaataatgttgaatttgctgttaatactgaaggtgtatatagtgaaccccgccccattggcacgcggtatttaacgaggaactta

SEQ ID NO: 35 - DNA, 2226 bp, synthetic construct
  source 1..2226: mol_type = other DNA
atggctgccgatggttatcttccagattggctcgaggacaaccttagtgaaggaattcgcgagtggtgggctttgaaacctggagcccctcaacccaaggcaaatcaacaacatcaagacaacgctcgaggtcttgtgcttccgggttacaaataccttggacccggcaacggactcgacaagggggagccggtcaacgcagcagacgcggcggccctcgagcacgacaaggcctacgaccagcagctcaaggccggagacaacccgtacctcaagtacaaccacgccgacgccgagttccaggagcggctcaaagaagatacgtcttttgggggcaacctcgggcgagcagtcttccaggccaaaaagaggcttcttgaacctcttggtctggttgaggaagcggctaagacggctcctggaaagaagaggcctgtagagcagtctcctcaggaaccggactcctccgcgggtattggcaaatcgggtgcacagcccgctaaaaagagactcaatttcggtcagactggcgacacagagtcagtcccagaccctcaaccaatcggagaacctcccgcagccccctcaggtgtgggatctcttacaatggcttcaggtggtggcgcaccagtggcagacaataacgaaggtgccgatggagtgggtagttcctcgggaaattggcattgcgattcccaatggctgggggacagagtcatcaccaccagcacccgaacctgggccctgcccacctacaacaatcacctctacaagcaaatctccaacagcacatctggaggatcttcaaatgacaacgcctacttcggctacagcaccccctgggggtattttgacttcaacagattccactgccacttctcaccacgtgactggcagcgactcatcaacaacaactggggattccggcctaagcgactcaacttcaagctcttcaacattcaggtcaaagaggttacggacaacaatggagtcaagaccatcgccaataaccttaccagcacggtccaggtcttcacggactcagactatcagctcccgtacgtgctcgggtcggctcacgagggctgcctcccgccgttcccagcggacgttttcatgattcctcagtacgggtatctgacgcttaatgatggaagccaggccgtgggtcgttcgtccttttactgcctggaatatttcccgtcgcaaatgctaagaacgggtaacaacttccagttcagctacgagtttgagaacgtacctttccatagcagctacgctcacagccaaagcctggaccgactaatgaatccactcatcgatcagtatctgtattacttgagtaagacgattaatggtcatgattctccgcattctaaggcgcagaatcatcagacgttgaagttttcggtagctggtcctagcaacatggctgtccagggaagaaactacatacctggacccagctaccgacaacaacgtgtctcaaccactgtgactcaaaacaacaacagcgaatttgcttggcctggagcttcttcttgggctctcaatggacgtaatagcttgatgaatcctggacctgctatggccagccacaaagaaggagaggaccgtttctttcctttgtctggatctttaatttttggcaaacaaggaactggaagagacaacgtggatgcggacaaagtcatgataaccaacgaagaagaaattaaaactactaacccggtagcaacggagtcctatggacaagtggccacaaaccaccagagtgcccaagcacaggcgcagaccggctgggttcaaaaccaaggaatacttccgggtatggtttggcaggacagagatgtgtacctgcaaggacccatttgggccaaaattcctcacacggacggcaactttcacccttctccgctgatgggagggtttggaatgaagcacccgcctcctcagatcctcatcaaaaacacacctgtacctgcggatcctccaacggccttcaacaaggacaagctgaactctttcatcacccagtattctactggccaagtcagcgtggagatcgagtgggagctgcagaaggaaaacagcaagcgctggaacccggagatccagtacacttccaactattacaagtctaataatgttgaatttgctgttaatactgaaggtgtatatagtgaaccccgccccattggcacgcggtatttaacgaggaactta

SEQ ID NO: 36 - protein, 742 aa, synthetic construct
MAADGYLPDWLEDNLSEGIREWWALKPGAPQPKANQQHQDNARGLVLPGYKYLGPGNGLDKGEPVNAADAAALEHDKAYDQQLKAGDNPYLKYNHADAEFQERLKEDTSFGGNLGRAVFQAKKRLLEPLGLVEEAAKTAPGKKRPVEQSPQEPDSSAGIGKSGAQPAKKRLNFGQTGDTESVPDPQPIGEPPAAPSGVGSLTMASGGGAPVADNNEGADGVGSSSGNWHCDSQWLGDRVITTSTRTWALPTYNNHLYKQISNSTSGGSSNDNAYFGYSTPWGYFDFNRFHCHFSPRDWQRLINNNWGFRPKRLNFKLFNIQVKEVTDNNGVKTIANNLTSTVQVFTDSDYQLPYVLGSAHEGCLPPFPADVFMIPQYGYLTLNDGSQAVGRSSFYCLEYFPSQMLRTGNNFQFSYEFENVPFHSSYAHSQSLDRLMNPLIDQYLYYLSKTERVSGSPHSKAQNQQTLKFSVAGPSNMAVQGRNYIPGPSYRQQRVSTTVTQNNNSEFAWPGASSWALNGRNSLMNPGPAMASHKEGEDRFFPLSGSLIFGKQGTGRDNVDADKVMITNEEEIKTTNPVATESYGQVATNHQSAQAQAQTGWVQNQGILPGMVWQDRDVYLQGPIWAKIPHTDGNFHPSPLMGGFGMKHPPPQILIKNTPVPADPPTAFNKDKLNSFITQYSTGQVSVEIEWELQKENSKRWNPEIQYTSNYYKSNNVEFAVNTEGVYSEPRPIGTRYLTRNL

SEQ ID NO: 37 - protein, 742 aa, synthetic construct
MAADGYLPDWLEDNLSEGIREWWALKPGAPQPKANQQHQDNARGLVLPGYKYLGPGNGLDKGEPVNAADAAALEHDKAYDQQLKAGDNPYLKYNHADAEFQERLKEDTSFGGNLGRAVFQAKKRLLEPLGLVEEAAKTAPGKKRPVEQSPQEPDSSAGIGKSGAQPAKKRLNFGQTGDTESVPDPQPIGEPPAAPSGVGSLTMASGGGAPVADNNEGADGVGSSSGNWHCDSQWLGDRVITTSTRTWALPTYNNHLYKQISNSTSGGSSNDNAYFGYSTPWGYFDFNRFHCHFSPRDWQRLINNNWGFRPKRLNFKLFNIQVKEVTDNNGVKTIANNLTSTVQVFTDSDYQLPYVLGSAHEGCLPPFPADVFMIPQYGYLTLNDGSQAVGRSSFYCLEYFPSQMLRTGNNFQFSYEFENVPFHSSYAHSQSLDRLMNPLIDQYLYYLSKAEIGHDSPHKSGQNQQTLKFSVAGPSNMAVQGRNYIPGPSYRQQRVSTTVTQNNNSEFAWPGASSWALNGRNSLMNPGPAMASHKEGEDRFFPLSGSLIFGKQGTGRDNVDADKVMITNEEEIKTTNPVATESYGQVATNHQSAQAQAQTGWVQNQGILPGMVWQDRDVYLQGPIWAKIPHTDGNFHPSPLMGGFGMKHPPPQILIKNTPVPADPPTAFNKDKLNSLITQYSTGQVSVEIEWELQKENSKRWNPEIQYTSNYYKSNNVEFAVNTEGVYSEPRPIGTRYLTRNL

SEQ ID NO: 38 - protein, 742 aa, synthetic construct
MAADGYLPDWLEDNLSEGIREWWALKPGAPQPKANQQHQDNARGLVLPGYKYLGPGNGLDKGEPVNAADAAALEHDKAYDQQLKAGDNPYLKYNHADAEFQERLKEDTSFGGNLGRAVFQAKKRLLEPLGLVEEAAKTAPGKKRPVEQSPQEPDSSAGIGKSGAQPAKKRLNFGQTGDTESVPDPQPIGEPPAAPSGVGSLTMASGGGAPVADNNEGADGVGSSSGNWHCDSQWLGDRVITTSTRTWALPTYNNHLYKQISNSTSGGSSNDNAYFGYSTPWGYFDFNRFHCHFSPRDWQRLINNNWGFRPKRLNFKLFNIQVKEVTDNNGVKTIANNLTSTVQVFTDSDYQLPYVLGSAHEGCLPPFPADVFMIPQYGYLTLNDGSQAVGRSSFYCLEYFPSQMLRTGNNFQFSYEFENVPFHSSYAHSQSLDRLMNPLIDQYLYYLSKTIIGSGSPHSKAQNRHTLKFSVAGPSNMAVQGRNYIPGPSYRQQRVSTTVTQNNNSEFAWPGASSWALNGRNSLMNPGPAMASHKEGEDRFFPLSGSLIFGKQGTGRDNVDADKVMITNEEEIKTTNPVATESYGQVATNHQSAQAQAQTGWVQNQGILPGMVWQDRDVYLQGPIWAKIPHTDGNFHPSPLMGGFGMKHPPPQILIKNTPVPADPPTAFNKDKLNSFITQYSTGQVSVEIEWELQKENSKRWNPEIQYTSNYYKSNNVEFAVNTEGVYSEPRPIGTRYLTRNL

SEQ ID NO: 39 - protein, 742 aa, synthetic construct
MAADGYLPDWLEDNLSEGIREWWALKPGAPQPKANQQHQDNARGLVLPGYKYLGPGNGLDKGEPVNAADAAALEHDKAYDQQLKAGDNPYLKYNHADAEFQERLKEDTSFGGNLGRAVFQAKKRLLEPLGLVEEAAKTAPGKKRPVEQSPQEPDSSAGIGKSGAQPAKKRLNFGQTGDTESVPDPQPIGEPPAAPSGVGSLTMASGGGAPVADNNEGADGVGSSSGNWHCDSQWLGDRVITTSTRTWALPTYNNHLYKQISNSTSGGSSNDNAYFGYSTPWGYFDFNRFHCHFSPRDWQRLINNNWGFRPKRLNFKLFNIQVKEVTDNNGVKTIANNLTSTVQVFTDSDYQLPYVLGSAHEGCLPPFPADVFMIPQYGYLTLNDGSQAVGRSSFYCLEYFPSQMLRTGNNFQFSYEFENVPFHSSYAHSQSLDRLMNPLIDQYLYYLSKTEKMSGSPHSKAQNQQTLKFSVAGPSNMAVQGRNYIPGPSYRQQRVSTTVTQNNNSEFAWPGASSWALNGRNSLMNPGPAMASHKEGEDRFFPLSGSLIFGKQGTGRDNVDADKVMITNEEEIKTTNPVATESYGQVATNHQSAQAQAQTGWVQNQGILPGMVWQDRDVYLQGPIWAKIPHTDGNFHPSPLMGGFGMKHPPPQILIKNTPVPADPPTAFNKDKLNSFITQYSTGQVSVEIEWELQKENSKRWNPEIQYTSNYYKSNNVEFAVNTEGVYSEPRPIGTRYLTRNL

SEQ ID NO: 40 - protein, 742 aa, synthetic construct
MAADGYLPDWLEDNLSEGIREWWALKPGAPQPKANQQHQDNARGLVLPGYKYLGPGNGLDKGEPVNAADAAALEHDKAYDQQLKAGDNPYLKYNHADAEFQERLKEDTSFGGNLGRAVFQAKKRLLEPLGLVEEAAKTAPGKKRPVEQSPQEPDSSAGIGKSGAQPAKKRLNFGQTGDTESVPDPQPIGEPPAAPSGVGSLTMASGGGAPVADNNEGADGVGSSSGNWHCDSQWLGDRVITTSTRTWALPTYNNHLYKQISNSTSGGSSNDNAYFGYSTPWGYFDFNRFHCHFSPRDWQRLINNNWGFRPKRLNFKLFNIQVKEVTDNNGVKTIANNLTSTVQVFTDSDYQLPYVLGSAHEGCLPPFPADVFMIPQYGYLTLNDGSQAVGRSSFYCLEYFPSQMLRTGNNFQFSYEFENVPFHSSYAHSQSLDRLMNPLIDQYLYYLSKEINGRGSPHSKAQNQQTLKFSVAGPSNMAVQGRNYIPGPSYRQQRVSTTVTQNNNSEFAWPGASSWALNGRNSLMNPGPAMASHKEGEDRFFPLSGSLIFGKQGTGRDNVDADKVMITNEEEIKTTNPVATESYGQVATNHQSAQAQAQTGWVQNQGILPGMVWQDRDVYLQGPIWAKIPHTDGNFHPSPLMGGFGMKHPPPQILIKNTPVPADPPTAFNKDKLNSFITQYSTGQVSVEIEWELQKENSKRWNPEIQYTSNYYKSNNVEFAVNTEGVYSEPRPIGTRYLTRNL

SEQ ID NO: 41 - protein, 742 aa, synthetic construct
MAADGYLPDWLEDNLSEGIREWWALKPGAPQPKANQQHQDNARGLVLPGYKYLGPGNGLDKGEPVNAADAAALEHDKAYDQQLKAGDNPYLKYNHADAEFQERLKEDTSFGGNLGRAVFQAKKRLLEPLGLVEEAAKTAPGKKRPVEQSPQEPDSSAGIGKSGAQPAKKRLNFGQTGDTESVPDPQPIGEPPAAPSGVGSLTMASGGGAPVADNNEGADGVGSSSGNWHCDSQWLGDRVITTSTRTWALPTYNNHLYKQISNSTSGGSSNDNAYFGYSTPWGYFDFNRFHCHFSPRDWQRLINNNWGFRPKRLNFKLFNIQVKEVTDNNGVKTIANNLTSTVQVFTDSDYQLPYVLGSAHEGCLPPFPADVFMIPQYGYLTLNDGSQAVGRSSFYCLEYFPSQMLRTGNNFQFSYEFENVPFHSSYAHSQSLDRLMNPLIDQYLYYLSKTFNGSGSPHSKAPNLQTLKFSVAGPSNMAVQGRNYIPGPSYRQQRVSTTVTQNNNSEFAWPGASSWALNGRNSLMNPGPAMASHKEGEDRFFPLSGSLIFGKQGTGRDNVDADKVMITNEEEIKTTNPVATESYGQVATNHQSAQAQAQTGWVQNQGILPGMVWQDRDVYLQGPIWAKIPHTDGNFHPSPLMGGFGMKHPPPQILIKNTPVPADPPTAFNKDKLNSFITQYSTGQVSVEIEWELQKENSKRWNPEIQYTSNYYKSNNVEFAVNTEGVYSEPRPIGTRYLTRNL

SEQ ID NO: 42 - protein, 742 aa, synthetic construct
MAADGYLPDWLEDNLSEGIREWWALKPGAPQPKANQQHQDNARGLVLPGYKYLGPGNGLDKGEPVNAADAAALEHDKAYDQQLKAGDNPYLKYNHADAEFQERLKEDTSFGGNLGRAVFQAKKRLLEPLGLVEEAAKTAPGKKRPVEQSPQEPDSSAGIGKSGAQPAKKRLNFGQTGDTESVPDPQPIGEPPAAPSGVGSLTMASGGGAPVADNNEGADGVGSSSGNWHCDSQWLGDRVITTSTRTWALPTYNNHLYKQISNSTSGGSSNDNAYFGYSTPWGYFDFNRFHCHFSPRDWQRLINNNWGFRPKRLNFKLFNIQVKEVTDNNGVKTIANNLTSTVQVFTDSDYQLPYVLGSAHEGCLPPFPADVFMIPQYGYLTLNDGSQAVGRSSFYCLEYFPSQMLRTGNNFQFSYEFENVPFHSSYAHSQSLDRLMNPLIDQYLYYLSKTEKTSGSPHSKAQNQQTLKFSVAGPSNMAVQGRNYIPGPSYRQQRVSTTVTQNNNSEFAWPGASSWALNGRNSLMNPGPAMASHKEGEDRFFPLSGSLIFGKQGTGRDNVDADKVMITNEEEIKTTNPVATESYGQVATNHQSAQAQAQTGWVQNQGILPGMVWQDRDVYLQGPIWAKIPHTDGNFHPSPLMGGFGMKHPPPQILIKNTPVPADPPTAFNKDKLNSFITQYSTGQVSVEIEWELQKENSKRWNPEIQYTSNYYKSNNVEFAVNTEGVYSEPRPIGTRYLTRNL

SEQ ID NO: 43 - protein, 742 aa, synthetic construct
MAADGYLPDWLEDNLSEGIREWWALKPGAPQPKANQQHQDNARGLVLPGYKYLGPGNGLDKGEPVNAADAAALEHDKAYDQQLKAGDNPYLKYNHADAEFQERLKEDTSFGGNLGRAVFQAKKRLLEPLGLVEEAAKTAPGKKRPVEQSPQEPDSSAGIGKSGAQPAKKRLNFGQTGDTESVPDPQPIGEPPAAPSGVGSLTMASGGGAPVADNNEGADGVGSSSGNWHCDSQWLGDRVITTSTRTWALPTYNNHLYKQISNSTSGGSSNDNAYFGYSTPWGYFDFNRFHCHFSPRDWQRLINNNWGFRPKRLNFKLFNIQVKEVTDNNGVKTIANNLTSTVQVFTDSDYQLPYVLGSAHEGCLPPFPADVFMIPQYGYLTLNDGSQAVGRSSFYCLEYFPSQMLRTGNNFQFSYEFENVPFHSSYAHSQSLDRLMNPLIDQYLYYLSKTMNGHDSPHSKAQNQQTLKFSVAGPSNMAVQGRNYIPGPSYRQQRVSTTVTQNNNSEFAWPGASSWALNGRNSLMNPGPAMASHKEGEDRFFPLSGSLIFGKQGTGRDNVDADKVMITNEEEIKTTNPVATESYGQVATNHQSAQAQAQTGWVQNQGILPGMVWQDRDVYLQGPIWAKIPHTDGNFHPSPLMGGFGMKHPPPQILIKNTPVPADPPTAFNKDKLNSFITQYSTGQVSVEIEWELQKENSKRWNPEIQYTSNYYKSNNVEFAVNTEGVYSEPRPIGTRYLTRNL

SEQ ID NO: 44 - protein, 742 aa, synthetic construct
MAADGYLPDWLEDNLSEGIREWWALKPGAPQPKANQQHQDNARGLVLPGYKYLGPGNGLDKGEPVNAADAAALEHDKAYDQQLKAGDNPYLKYNHADAEFQERLKEDTSFGGNLGRAVFQAKKRLLEPLGLVEEAAKTAPGKKRPVEQSPQEPDSSAGIGKSGAQPAKKRLNFGQTGDTESVPDPQPIGEPPAAPSGVGSLTMASGGGAPVADNNEGADGVGSSSGNWHCDSQWLGDRVITTSTRTWALPTYNNHLYKQISNSTSGGSSNDNAYFGYSTPWGYFDFNRFHCHFSPRDWQRLINNNWGFRPKRLNFKLFNIQVKEVTDNNGVKTIANNLTSTVQVFTDSDYQLPYVLGSAHEGCLPPFPADVFMIPQYGYLTLNDGSQAVGRSSFYCLEYFPSQMLRTGNNFQFSYEFENVPFHSSYAHSQSLDRLMNPLIDQYLYYLSKTIDGHDSPHSKAQNQQTLKFSVAGPSNMAVQGRNYIPGPSYRQQRVSTTVTQNNNSEFAWPGASSWALNGRNSLMNPGPAMASHKEGEDRFFPLSGSLIFGKQGTGRDNVDADKVMITNEEEIKTTNPVATESYGQVATNHQSAQAQAQTGWVQNQGILPGMVWQDRDVYLQGPIWAKIPHTDGNFHPSPLMGGFGMKHPPPQILIKNTPVPADPPTAFNKDKLNSFITQYSTGQVSVEIEWELQKENSKRWNPEIQYTSNYYKSNNVEFAVNTEGVYSEPRPIGTRYLTRNL

SEQ ID NO: 45 - protein, 742 aa, synthetic construct
MAADGYLPDWLEDNLSEGIREWWALKPGAPQPKANQQHQDNARGLVLPGYKYLGPGNGLDKGEPVNAADAAALEHDKAYDQQLKAGDNPYLKYNHADAEFQERLKEDTSFGGNLGRAVFQAKKRLLEPLGLVEEAAKTAPGKKRPVEQSPQEPDSSAGIGKSGAQPAKKRLNFGQTGDTESVPDPQPIGEPPAAPSGVGSLTMASGGGAPVADNNEGADGVGSSSGNWHCDSQWLGDRVITTSTRTWALPTYNNHLYKQISNSTSGGSSNDNAYFGYSTPWGYFDFNRFHCHFSPRDWQRLINNNWGFRPKRLNFKLFNIQVKEVTDNNGVKTIANNLTSTVQVFTDSDYQLPYVLGSAHEGCLPPFPADVFMIPQYGYLTLNDGSQAVGRSSFYCLEYFPSQMLRTGNNFQFSYEFENVPFHSSYAHSQSLDRLMNPLIDQYLYYLSKTNNGHDSPHSKAQNQQTLKFSVAGPSNMAVQGRNYIPGPSYRQQRVSTTVTQNNNSEFAWPGASSWALNGRNSLMNPGPAMASHKEGEDRFFPLSGSLIFGKQGTGRDNVDADKVMITNEEEIKTTNPVATESYGQVATNHQSAQAQAQTGWVQNQGILPGMVWQDRDVYLQGPIWAKIPHTDGNFHPSPLMGGFGMKHPPPQILIKNTPVPADPPTAFNKDKLNSFITQYSTGQVSVEIEWELQKENSKRWNPEIQYTSNYYKSNNVEFAVNTEGVYSEPRPIGTRYLTRNL

SEQ ID NO: 46 - protein, 742 aa, synthetic construct
MAADGYLPDWLEDNLSEGIREWWALKPGAPQPKANQQHQDNARGLVLPGYKYLGPGNGLDKGEPVNAADAAALEHDKAYDQQLKAGDNPYLKYNHADAEFQERLKEDTSFGGNLGRAVFQAKKRLLEPLGLVEEAAKTAPGKKRPVEQSPQEPDSSAGIGKSGAQPAKKRLNFGQTGDTESVPDPQPIGEPPAAPSGVGSLTMASGGGAPVADNNEGADGVGSSSGNWHCDSQWLGDRVITTSTRTWALPTYNNHLYKQISNSTSGGSSNDNAYFGYSTPWGYFDFNRFHCHFSPRDWQRLINNNWGFRPKRLNFKLFNIQVKEVTDNNGVKTIANNLTSTVQVFTDSDYQLPYVLGSAHEGCLPPFPADVFMIPQYGYLTLNDGSQAVGRSSFYCLEYFPSQMLRTGNNFQFSYEFENVPFHSSYAHSQSLDRLMNPLIDQYLYYLSKTQRKSGSPHSKAQNQQTLKFSVAGPSNMAVQGRNYIPGPSYRQQRVSTTVTQNNNSEFAWPGASSWALNGRNSLMNPGPAMASHKEGEDRFFPLSGSLIFGKQGTGRDNVDADKVMITNEEEIKTTNPVATESYGQVATNHQSAQAQAQTGWVQNQGILPGMVWQDRDVYLQGPIWAKIPHTDGNFHPSPLMGGFGMKHPPPQILIKNTPVPADPPTAFNKDKLNSFITQYSTGQVSVEIEWELQKENSKRWNPEIQYTSNYYKSNNVEFAVNTEGVYSEPRPIGTRYLTRNL

SEQ ID NO: 47 - protein, 742 aa, synthetic construct
MAADGYLPDWLEDNLSEGIREWWALKPGAPQPKANQQHQDNARGLVLPGYKYLGPGNGLDKGEPVNAADAAALEHDKAYDQQLKAGDNPYLKYNHADAEFQERLKEDTSFGGNLGRAVFQAKKRLLEPLGLVEEAAKTAPGKKRPVEQSPQEPDSSAGIGKSGAQPAKKRLNFGQTGDTESVPDPQPIGEPPAAPSGVGSLTMASGGGAPVADNNEGADGVGSSSGNWHCDSQWLGDRVITTSTRTWALPTYNNHLYKQISNSTSGGSSNDNAYFGYSTPWGYFDFNRFHCHFSPRDWQRLINNNWGFRPKRLNFKLFNIQVKEVTDNNGVKTIANNLTSTVQVFTDSDYQLPYVLGSAHEGCLPPFPADVFMIPQYGYLTLNDGSQAVGRSSFYCLEYFPSQMLRTGNNFQFSYEFENVPFHSSYAHSQSLDRLMNPLIDQYLYYLSKTINGSGSPHSKAQARKTLKFSVAGPSNMAVQGRNYIPGPSYRQQRVSTTVTQNNNSEFAWPGASSWALNGRNSLMNPGPAMASHKEGEDRFFPLSGSLIFGKQGTGRDNVDADKVMITNEEEIKTTNPVATESYGQVATNHQSAQAQAQTGWVQNQGILPGMVWQDRDVYLQGPIWAKIPHTDGNFHPSPLMGGFGMKHPPPQILIKNTPVPADPPTAFNKDKLNSFITQYSTGQVSVEIEWELQKENSKRWNPEIQYTSNYYKSNNVEFAVNTEGVYSEPRPIGTRYLTRNL

SEQ ID NO: 48 - protein, 742 aa, synthetic construct
MAADGYLPDWLEDNLSEGIREWWALKPGAPQPKANQQHQDNARGLVLPGYKYLGPGNGLDKGEPVNAADAAALEHDKAYDQQLKAGDNPYLKYNHADAEFQERLKEDTSFGGNLGRAVFQAKKRLLEPLGLVEEAAKTAPGKKRPVEQSPQEPDSSAGIGKSGAQPAKKRLNFGQTGDTESVPDPQPIGEPPAAPSGVGSLTMASGGGAPVADNNEGADGVGSSSGNWHCDSQWLGDRVITTSTRTWALPTYNNHLYKQISNSTSGGSSNDNAYFGYSTPWGYFDFNRFHCHFSPRDWQRLINNNWGFRPKRLNFKLFNIQVKEVTDNNGVKTIANNLTSTVQVFTDSDYQLPYVLGSAHEGCLPPFPADVFMIPQYGYLTLNDGSQAVGRSSFYCLEYFPSQMLRTGNNFQFSYEFENVPFHSSYAHSQSLDRLMNPLIDQYLYYLSKYIVGSGSPHSKAQNQQTLKFSVAGPSNMAVQGRNYIPGPSYRQQRVSTTVTQNNNSEFAWPGASSWALNGRNSLMNPGPAMASHKEGEDRFFPLSGSLIFGKQGTGRDNVDADKVMITNEEEIKTTNPVATESYGQVATNHQSAQAQAQTGWVQNQGILPGMVWQDRDVYLQGPIWAKIPHTDGNFHPSPLMGGFGMKHPPPQILIKNTPVPADPPTAFNKDKLNSFITQYSTGQVSVEIEWELQKENSKRWNPEIQYTSNYYKSNNVEFAVNTEGVYSEPRPIGTRYLTRNL

SEQ ID NO: 49 - protein, 742 aa, synthetic construct
MAADGYLPDWLEDNLSEGIREWWALKPGAPQPKANQQHQDNARGLVLPGYKYLGPGNGLDKGEPVNAADAAALEHDKAYDQQLKAGDNPYLKYNHADAEFQERLKEDTSFGGNLGRAVFQAKKRLLEPLGLVEEAAKTAPGKKRPVEQSPQEPDSSAGIGKSGAQPAKKRLNFGQTGDTESVPDPQPIGEPPAAPSGVGSLTMASGGGAPVADNNEGADGVGSSSGNWHCDSQWLGDRVITTSTRTWALPTYNNHLYKQISNSTSGGSSNDNAYFGYSTPWGYFDFNRFHCHFSPRDWQRLINNNWGFRPKRLNFKLFNIQVKEVTDNNGVKTIANNLTSTVQVFTDSDYQLPYVLGSAHEGCLPPFPADVFMIPQYGYLTLNDGSQAVGRSSFYCLEYFPSQMLRTGNNFQFSYEFENVPFHSSYAHSQSLDRLMNPLIDQYLYYLSKTISKRGSPHSKAQNQQTLKFSVAGPSNMAVQGRNYIPGPSYRQQRVSTTVTQNNNSEFAWPGASSWALNGRNSLMNPGPAMASHKEGEDRFFPLSGSLIFGKQGTGRDNVDADKVMITNEEEIKTTNPVATESYGQVATNHQSAQAQAQTGWVQNQGILPGMVWQDRDVYLQGPIWAKIPHTDGNFHPSPLMGGFGMKHPPPQILIKNTPVPADPPTAFNKDKLNSFITQYSTGQVSVEIEWELQKENSKRWNPEIQYTSNYYKSNNVEFAVNTEGVYSEPRPIGTRYLTRNL

SEQ ID NO: 50 - protein, 742 aa, synthetic construct
MAADGYLPDWLEDNLSEGIREWWALKPGAPQPKANQQHQDNARGLVLPGYKYLGPGNGLDKGEPVNAADAAALEHDKAYDQQLKAGDNPYLKYNHADAEFQERLKEDTSFGGNLGRAVFQAKKRLLEPLGLVEEAAKTAPGKKRPVEQSPQEPDSSAGIGKSGAQPAKKRLNFGQTGDTESVPDPQPIGEPPAAPSGVGSLTMASGGGAPVADNNEGADGVGSSSGNWHCDSQWLGDRVITTSTRTWALPTYNNHLYKQISNSTSGGSSNDNAYFGYSTPWGYFDFNRFHCHFSPRDWQRLINNNWGFRPKRLNFKLFNIQVKEVTDNNGVKTIANNLTSTVQVFTDSDYQLPYVLGSAHEGCLPPFPADVFMIPQYGYLTLNDGSQAVGRSSFYCLEYFPSQMLRTGNNFQFSYEFENVPFHSSYAHSQSLDRLMNPLIDQYLYYLSKGLGGSGSPHSKAQNQQTLKFSVAGPSNMAVQGRNYIPGPSYRQQRVSTTVTQNNNSEFAWPGASSWALNGRNSLMNPGPAMASHKEGEDRFFPLSGSLIFGKQGTGRDNVDADKVMITNEEEIKTTNPVATESYGQVATNHQSAQAQAQTGWVQNQGILPGMVWQDRDVYLQGPIWAKIPHTDGNFHPSPLMGGFGMKHPPPQILIKNTPVPADPPTAFNKDKLNSFITQYSTGQVSVEIEWELQKENSKRWNPEIQYTSNYYKSNNVEFAVNTEGVYSEPRPIGTRYLTRNL

SEQ ID NO: 51 - protein, 742 aa, synthetic construct
MAADGYLPDWLEDNLSEGIREWWALKPGAPQPKANQQHQDNARGLVLPGYKYLGPGNGLDKGEPVNAADAAALEHDKAYDQQLKAGDNPYLKYNHADAEFQERLKEDTSFGGNLGRAVFQAKKRLLEPLGLVEEAAKTAPGKKRPVEQSPQEPDSSAGIGKSGAQPAKKRLNFGQTGDTESVPDPQPIGEPPAAPSGVGSLTMASGGGAPVADNNEGADGVGSSSGNWHCDSQWLGDRVITTSTRTWALPTYNNHLYKQISNSTSGGSSNDNAYFGYSTPWGYFDFNRFHCHFSPRDWQRLINNNWGFRPKRLNFKLFNIQVKEVTDNNGVKTIANNLTSTVQVFTDSDYQLPYVLGSAHEGCLPPFPADVFMIPQYGYLTLNDGSQAVGRSSFYCLEYFPSQMLRTGNNFQFSYEFENVPFHSSYAHSQSLDRLMNPLIDQYLYYLSKTINGHDSPHSKAQNLQTLKFSVAGPSNMAVQGRNYIPGPSYRQQRVSTTVTQNNNSEFAWPGASSWALNGRNSLMNPGPAMASHKEGEDRFFPLSGSLIFGKQGTGRDNVDADKVMITNEEEIKTTNPVATESYGQVATNHQSAQAQAQTGWVQNQGILPGMVWQDRDVYLQGPIWAKIPHTDGNFHPSPLMGGFGMKHPPPQILIKNTPVPADPPTAFNKDKLNSFITQYSTGQVSVEIEWELQKENSKRWNPEIQYTSNYYKSNNVEFAVNTEGVYSEPRPIGTRYLTRNL

SEQ ID NO: 52 - protein, 742 aa, synthetic construct
MAADGYLPDWLEDNLSEGIREWWALKPGAPQPKANQQHQDNARGLVLPGYKYLGPGNGLDKGEPVNAADAAALEHDKAYDQQLKAGDNPYLKYNHADAEFQERLKEDTSFGGNLGRAVFQAKKRLLEPLGLVEEAAKTAPGKKRPVEQSPQEPDSSAGIGKSGAQPAKKRLNFGQTGDTESVPDPQPIGEPPAAPSGVGSLTMASGGGAPVADNNEGADGVGSSSGNWHCDSQWLGDRVITTSTRTWALPTYNNHLYKQISNSTSGGSSNDNAYFGYSTPWGYFDFNRFHCHFSPRDWQRLINNNWGFRPKRLNFKLFNIQVKEVTDNNGVKTIANNLTSTVQVFTDSDYQLPYVLGSAHEGCLPPFPADVFMIPQYGYLTLNDGSQAVGRSSFYCLEYFPSQMLRTGNNFQFSYEFENVPFHSSYAHSQSLDRLMNPLIDQYLYYLSKTVNGHDSPHSKAQNQQTLKFSVAGPSNMAVQGRNYIPGPSYRQQRVSTTVTQNNNSEFAWPGASSWALNGRNSLMNPGPAMASHKEGEDRFFPLSGSLIFGKQGTGRDNVDADKVMITNEEEIKTTNPVATESYGQVATNHQSAQAQAQTGWVQNQGILPGMVWQDRDVYLQGPIWAKIPHTDGNFHPSPLMGGFGMKHPPPQILIKNTPVPADPPTAFNKDKLNSFITQYSTGQVSVEIEWELQKENSKRWNPEIQYTSNYYKSNNVEFAVNTEGVYSEPRPIGTRYLTRNL

SEQ ID NO: 53 - protein, 742 aa, synthetic construct
MAADGYLPDWLEDNLSEGIREWWALKPGAPQPKANQQHQDNARGLVLPGYKYLGPGNGLDKGEPVNAADAAALEHDKAYDQQLKAGDNPYLKYNHADAEFQERLKEDTSFGGNLGRAVFQAKKRLLEPLGLVEEAAKTAPGKKRPVEQSPQEPDSSAGIGKSGAQPAKKRLNFGQTGDTESVPDPQPIGEPPAAPSGVGSLTMASGGGAPVADNNEGADGVGSSSGNWHCDSQWLGDRVITTSTRTWALPTYNNHLYKQISNSTSGGSSNDNAYFGYSTPWGYFDFNRFHCHFSPRDWQRLINNNWGFRPKRLNFKLFNIQVKEVTDNNGVKTIANNLTSTVQVFTDSDYQLPYVLGSAHEGCLPPFPADVFMIPQYGYLTLNDGSQAVGRSSFYCLEYFPSQMLRTGNNFQFSYEFENVPFHSSYAHSQSLDRLMNPLIDQYLYYLSKTINGHDSPHSKALNQQTLKFSVAGPSNMAVQGRNYIPGPSYRQQRVSTTVTQNNNSEFAWPGASSWALNGRNSLMNPGPAMASHKEGEDRFFPLSGSLIFGKQGTGRDNVDADKVMITNEEEIKTTNPVATESYGQVATNHQSAQAQAQTGWVQNQGILPGMVWQDRDVYLQGPIWAKIPHTDGNFHPSPLMGGFGMKHPPPQILIKNTPVPADPPTAFNKDKLNSFITQYSTGQVSVEIEWELQKENSKRWNPEIQYTSNYYKSNNVEFAVNTEGVYSEPRPIGTRYLTRNL

SEQ ID NO: 54 - protein, 742 aa, synthetic construct
MAADGYLPDWLEDNLSEGIREWWALKPGAPQPKANQQHQDNARGLVLPGYKYLGPGNGLDKGEPVNAADAAALEHDKAYDQQLKAGDNPYLKYNHADAEFQERLKEDTSFGGNLGRAVFQAKKRLLEPLGLVEEAAKTAPGKKRPVEQSPQEPDSSAGIGKSGAQPAKKRLNFGQTGDTESVPDPQPIGEPPAAPSGVGSLTMASGGGAPVADNNEGADGVGSSSGNWHCDSQWLGDRVITTSTRTWALPTYNNHLYKQISNSTSGGSSNDNAYFGYSTPWGYFDFNRFHCHFSPRDWQRLINNNWGFRPKRLNFKLFNIQVKEVTDNNGVKTIANNLTSTVQVFTDSDYQLPYVLGSAHEGCLPPFPADVFMIPQYGYLTLNDGSQAVGRSSFYCLEYFPSQMLRTGNNFQFSYEFENVPFHSSYAHSQSLDRLMNPLIDQYLYYLSKTINGHDSPHSKAQNQQSLKFSVAGPSNMAVQGRNYIPGPSYRQQRVSTTVTQNNNSEFAWPGASSWALNGRNSLMNPGPAMASHKEGEDRFFPLSGSLIFGKQGTGRDNVDADKVMITNEEEIKTTNPVATESYGQVATNHQSAQAQAQTGWVQNQGILPGMVWQDRDVYLQGPIWAKIPHTDGNFHPSPLMGGFGMKHPPPQILIKNTPVPADPPTAFNKDKLNSFITQYSTGQVSVEIEWELQKENSKRWNPEIQYTSNYYKSNNVEFAVNTEGVYSEPRPIGTRYLTRNL

SEQ ID NO: 55 - protein, 742 aa, synthetic construct
MAADGYLPDWLEDNLSEGIREWWALKPGAPQPKANQQHQDNARGLVLPGYKYLGPGNGLDKGEPVNAADAAALEHDKAYDQQLKAGDNPYLKYNHADAEFQERLKEDTSFGGNLGRAVFQAKKRLLEPLGLVEEAAKTAPGKKRPVEQSPQEPDSSAGIGKSGAQPAKKRLNFGQTGDTESVPDPQPIGEPPAAPSGVGSLTMASGGGAPVADNNEGADGVGSSSGNWHCDSQWLGDRVITTSTRTWALPTYNNHLYKQISNSTSGGSSNDNAYFGYSTPWGYFDFNRFHCHFSPRDWQRLINNNWGFRPKRLNFKLFNIQVKEVTDNNGVKTIANNLTSTVQVFTDSDYQLPYVLGSAHEGCLPPFPADVFMIPQYGYLTLNDGSQAVGRSSFYCLEYFPSQMLRTGNNFQFSYEFENVPFHSSYAHSQSLDRLMNPLIDQYLYYLSKTINGHDSPHSKAQNQQILKFSVAGPSNMAVQGRNYIPGPSYRQQRVSTTVTQNNNSEFAWPGASSWALNGRNSLMNPGPAMASHKEGEDRFFPLSGSLIFGKQGTGRDNVDADKVMITNEEEIKTTNPVATESYGQVATNHQSAQAQAQTGWVQNQGILPGMVWQDRDVYLQGPIWAKIPHTDGNFHPSPLMGGFGMKHPPPQILIKNTPVPADPPTAFNKDKLNSFITQYSTGQVSVEIEWELQKENSKRWNPEIQYTSNYYKSNNVEFAVNTEGVYSEPRPIGTRYLTRNL

SEQ ID NO: 56 - protein, 742 aa, synthetic construct
MAADGYLPDWLEDNLSEGIREWWALKPGAPQPKANQQHQDNARGLVLPGYKYLGPGNGLDKGEPVNAADAAALEHDKAYDQQLKAGDNPYLKYNHADAEFQERLKEDTSFGGNLGRAVFQAKKRLLEPLGLVEEAAKTAPGKKRPVEQSPQEPDSSAGIGKSGAQPAKKRLNFGQTGDTESVPDPQPIGEPPAAPSGVGSLTMASGGGAPVADNNEGADGVGSSSGNWHCDSQWLGDRVITTSTRTWALPTYNNHLYKQISNSTSGGSSNDNAYFGYSTPWGYFDFNRFHCHFSPRDWQRLINNNWGFRPKRLNFKLFNIQVKEVTDNNGVKTIANNLTSTVQVFTDSDYQLPYVLGSAHEGCLPPFPADVFMIPQYGYLTLNDGSQAVGRSSFYCLEYFPSQMLRTGNNFQFSYEFENVPFHSSYAHSQSLDRLMNPLIDQYLYYLSKTINGSGSPHFTRQNQQTLKFSVAGPSNMAVQGRNYIPGPSYRQQRVSTTVTQNNNSEFAWPGASSWALNGRNSLMNPGPAMASHKEGEDRFFPLSGSLIFGKQGTGRDNVDADKVMITNEEEIKTTNPVATESYGQVATNHQSAQAQAQTGWVQNQGILPGMVWQDRDVYLQGPIWAKIPHTDGNFHPSPLMGGFGMKHPPPQILIKNTPVPADPPTAFNKDKLNSFITQYSTGQVSVEIEWELQKENSKRWNPEIQYTSNYYKSNNVEFAVNTEGVYSEPRPIGTRYLTRNL

SEQ ID NO: 57 - protein, 742 aa, synthetic construct
MAADGYLPDWLEDNLSEGIREWWALKPGAPQPKANQQHQDNARGLVLPGYKYLGPGNGLDKGEPVNAADAAALEHDKAYDQQLKAGDNPYLKYNHADAEFQERLKEDTSFGGNLGRAVFQAKKRLLEPLGLVEEAAKTAPGKKRPVEQSPQEPDSSAGIGKSGAQPAKKRLNFGQTGDTESVPDPQPIGEPPAAPSGVGSLTMASGGGAPVADNNEGADGVGSSSGNWHCDSQWLGDRVITTSTRTWALPTYNNHLYKQISNSTSGGSSNDNAYFGYSTPWGYFDFNRFHCHFSPRDWQRLINNNWGFRPKRLNFKLFNIQVKEVTDNNGVKTIANNLTSTVQVFTDSDYQLPYVLGSAHEGCLPPFPADVFMIPQYGYLTLNDGSQAVGRSSFYCLEYFPSQMLRTGNNFQFSYEFENVPFHSSYAHSQSLDRLMNPLIDQYLYYLSKTSNGHDSPHSKAQNQQTLKFSVAGPSNMAVQGRNYIPGPSYRQQRVSTTVTQNNNSEFAWPGASSWALNGRNSLMNPGPAMASHKEGEDRFFPLSGSLIFGKQGTGRDNVDADKVMITNEEEIKTTNPVATESYGQVATNHQSAQAQAQTGWVQNQGILPGMVWQDRDVYLQGPIWAKIPHTDGNFHPSPLMGGFGMKHPPPQILIKNTPVPADPPTAFNKDKLNSFITQYSTGQVSVEIEWELQKENSKRWNPEIQYTSNYYKSNNVEFAVNTEGVYSEPRPIGTRYLTRNL

SEQ ID NO: 58 - protein, 742 aa, synthetic construct
MAADGYLPDWLEDNLSEGIREWWALKPGAPQPKANQQHQDNARGLVLPGYKYLGPGNGLDKGEPVNAADAAALEHDKAYDQQLKAGDNPYLKYNHADAEFQERLKEDTSFGGNLGRAVFQAKKRLLEPLGLVEEAAKTAPGKKRPVEQSPQEPDSSAGIGKSGAQPAKKRLNFGQTGDTESVPDPQPIGEPPAAPSGVGSLTMASGGGAPVADNNEGADGVGSSSGNWHCDSQWLGDRVITTSTRTWALPTYNNHLYKQISNSTSGGSSNDNAYFGYSTPWGYFDFNRFHCHFSPRDWQRLINNNWGFRPKRLNFKLFNIQVKEVTDNNGVKTIANNLTSTVQVFTDSDYQLPYVLGSAHEGCLPPFPADVFMIPQYGYLTLNDGSQAVGRSSFYCLEYFPSQMLRTGNNFQFSYEFENVPFHSSYAHSQSLDRLMNPLIDQYLYYLSKTINGSGSPHSLPWNQQTLKFSVAGPSNMAVQGRNYIPGPSYRQQRVSTTVTQNNNSEFAWPGASSWALNGRNSLMNPGPAMASHKEGEDRFFPLSGSLIFGKQGTGRDNVDADKVMITNEEEIKTTNPVATESYGQVATNHQSAQAQAQTGWVQNQGILPGMVWQDRDVYLQGPIWAKIPHTDGNFHPSPLMGGFGMKHPPPQILIKNTPVPADPPTAFNKDKLNSFITQYSTGQVSVEIEWELQKENSKRWNPEIQYTSNYYKSNNVEFAVNTEGVYSEPRPIGTRYLTRNL

SEQ ID NO: 59 - protein, 742 aa, synthetic construct
MAADGYLPDWLEDNLSEGIREWWALKPGAPQPKANQQHQDNARGLVLPGYKYLGPGNGLDKGEPVNAADAAALEHDKAYDQQLKAGDNPYLKYNHADAEFQERLKEDTSFGGNLGRAVFQAKKRLLEPLGLVEEAAKTAPGKKRPVEQSPQEPDSSAGIGKSGAQPAKKRLNFGQTGDTESVPDPQPIGEPPAAPSGVGSLTMASGGGAPVADNNEGADGVGSSSGNWHCDSQWLGDRVITTSTRTWALPTYNNHLYKQISNSTSGGSSNDNAYFGYSTPWGYFDFNRFHCHFSPRDWQRLINNNWGFRPKRLNFKLFNIQVKEVTDNNGVKTIANNLTSTVQVFTDSDYQLPYVLGSAHEGCLPPFPADVFMIPQYGYLTLNDGSQAVGRSSFYCLEYFPSQMLRTGNNFQFSYEFENVPFHSSYAHSQSLDRLMNPLIDQYLYYLSKTINGHDSPHSKAQNHQTLKFSVAGPSNMAVQGRNYIPGPSYRQQRVSTTVTQNNNSEFAWPGASSWALNGRNSLMNPGPAMASHKEGEDRFFPLSGSLIFGKQGTGRDNVDADKVMITNEEEIKTTNPVATESYGQVATNHQSAQAQAQTGWVQNQGILPGMVWQDRDVYLQGPIWAKIPHTDGNFHPSPLMGGFGMKHPPPQILIKNTPVPADPPTAFNKDKLNSFITQYSTGQVSVEIEWELQKENSKRWNPEIQYTSNYYKSNNVEFAVNTEGVYSEPRPIGTRYLTRNL

SEQ ID NO: 60 - protein, 9 aa, synthetic construct
GSGSPHSKA

SEQ ID NO: 61 - protein, 9 aa, synthetic construct
  VARIANT 1: note = Any amino acid
  VARIANT 2: note = Any amino acid other than S
  VARIANT 3: note = Any amino acid other than G
  VARIANT 8: note = Any amino acid
  VARIANT 9: note = Any amino acid
XXXSPHKXX

SEQ ID NO: 62 - protein, 9 aa, synthetic construct
GHDSPHKSG

SEQ ID NO: 63 - protein, 4 aa, synthetic construct
SPHS

SEQ ID NO: 64 - protein, 5 aa, synthetic construct
SPHSK

SEQ ID NO: 65 - protein, 4 aa, synthetic construct
HDSP

SEQ ID NO: 66 - protein, 5 aa, synthetic construct
HDSPH

SEQ ID NO: 67 - protein, 5 aa, synthetic construct
SPHKS

SEQ ID NO: 68 - protein, 5 aa, synthetic construct
SPHAR

SEQ ID NO: 69 - protein, 5 aa, synthetic construct
SPHVK

SEQ ID NO: 70 - protein, 5 aa, synthetic construct
SPHAS

SEQ ID NO: 71 - protein, 5 aa, synthetic construct
SPHKK

SEQ ID NO: 72 - protein, 5 aa, synthetic construct
SPHVR

SEQ ID NO: 73 - protein, 5 aa, synthetic construct
SPHRK

SEQ ID NO: 74 - protein, 5 aa, synthetic construct
SPHKT

SEQ ID NO: 75 - protein, 5 aa, synthetic construct
SPHKF

SEQ ID NO: 76 - protein, 5 aa, synthetic construct
SPHKI

SEQ ID NO: 77 - protein, 5 aa, synthetic construct
SPHKL

SEQ ID NO: 78 - protein, 5 aa, synthetic construct
SPHKY

SEQ ID NO: 79 - protein, 5 aa, synthetic construct
SPHTR

SEQ ID NO: 80 - protein, 5 aa, synthetic construct
SPHKR

SEQ ID NO: 81 - protein, 5 aa, synthetic construct
SPHGA

SEQ ID NO: 82 - protein, 5 aa, synthetic construct
SPHSR

SEQ ID NO: 83 - protein, 5 aa, synthetic construct
SPHSL

SEQ ID NO: 84 - protein, 5 aa, synthetic construct
SPHSS

SEQ ID NO: 85 - protein, 5 aa, synthetic construct
SPHFL

SEQ ID NO: 86 - protein, 5 aa, synthetic construct
SPHWK

SEQ ID NO: 87 - protein, 5 aa, synthetic construct
SPHGK

SEQ ID NO: 88 - protein, 5 aa, synthetic construct
SPHTK

SEQ ID NO: 89 - protein, 5 aa, synthetic construct
SPHNK

SEQ ID NO: 90 - protein, 5 aa, synthetic construct
SPHAK

SEQ ID NO: 91 - protein, 5 aa, synthetic construct
SPHKH

SEQ ID NO: 92 - protein, 5 aa, synthetic construct
SPHKM

SEQ ID NO: 93 - protein, 5 aa, synthetic construct
SPHRS

SEQ ID NO: 94 - protein, 6 aa, synthetic construct
SPHKSA

SEQ ID NO: 95 - protein, 6 aa, synthetic construct
SPHSKT

SEQ ID NO: 96 - protein, 6 aa, synthetic construct
SPHSKG

SEQ ID NO: 97 - protein, 6 aa, synthetic construct
SPHGKA

SEQ ID NO: 98 - protein, 6 aa, synthetic construct
SPHNKA

SEQ ID NO: 99 - protein, 6 aa, synthetic construct
SPHSKN

SEQ ID NO: 100 - protein, 6 aa, synthetic construct
SPHAKA

SEQ ID NO: 101 - protein, 6 aa, synthetic construct
SPHSKV

SEQ ID NO: 102 - protein, 6 aa, synthetic construct
SPHKTG

SEQ ID NO: 103 - protein, 6 aa, synthetic construct
SPHTKA

SEQ ID NO: 104 - protein, 6 aa, synthetic construct
SPHKSL

SEQ ID NO: 105 - protein, 6 aa, synthetic construct
SPHKSE

SEQ ID NO: 106 - protein, 6 aa, synthetic construct
SPHKSV

SEQ ID NO: 107 - protein, 6 aa, synthetic construct
SPHKSW

SEQ ID NO: 108 - protein, 6 aa, synthetic construct
SPHKSN

SEQ ID NO: 109 - protein, 6 aa, synthetic construct
SPHKHG

SEQ ID NO: 110 - protein, 6 aa, synthetic construct
SPHKSQ

SEQ ID NO: 111 - protein, 6 aa, synthetic construct
SPHKSK

SEQ ID NO: 112 - protein, 6 aa, synthetic construct
SPHKLW

SEQ ID NO: 113 - protein, 6 aa, synthetic construct
SPHWKG

SEQ ID NO: 114 - protein, 6 aa, synthetic construct
SPHKMG

SEQ ID NO: 115 - protein, 6 aa, synthetic construct
SPHKMA

SEQ ID NO: 116 - protein, 5 aa, synthetic construct
SGSPH

SEQ ID NO: 117 - protein, 5 aa, synthetic construct
QDSPH

SEQ ID NO: 118 - protein, 5 aa, synthetic construct
RGSPH

SEQ ID NO: 119 - protein, 5 aa, synthetic construct
SHSPH

SEQ ID NO: 120 - protein, 5 aa, synthetic construct
QSSPH

SEQ ID NO: 121 - protein, 5 aa, synthetic construct
DDSPH

SEQ ID NO: 122 - protein, 5 aa, synthetic construct
HESPH

SEQ ID NO: 123 - protein, 5 aa, synthetic construct
NYSPH

SEQ ID NO: 124 - protein, 5 aa, synthetic construct
VGSPH

SEQ ID NO: 125 - protein, 5 aa, synthetic construct
SCSPH

SEQ ID NO: 126 - protein, 5 aa, synthetic construct
LLSPH

SEQ ID NO: 127 - protein, 5 aa, synthetic construct
NGSPH

SEQ ID NO: 128 - protein, 5 aa, synthetic construct
PGSPH

SEQ ID NO: 129 - protein, 5 aa, synthetic construct
GGSPH

SEQ ID NO: 130 - protein, 5 aa, synthetic construct
TGSPH

SEQ ID NO: 131 - protein, 5 aa, synthetic construct
SVSPH

SEQ ID NO: 132 - protein, 5 aa, synthetic construct
IGSPH

SEQ ID NO: 133 - protein, 5 aa, synthetic construct
DGSPH

SEQ ID NO: 134 - protein, 5 aa, synthetic construct
LGSPH

SEQ ID NO: 135 - protein, 5 aa, synthetic construct
AGSPH

SEQ ID NO: 136 - protein, 5 aa, synthetic construct
EGSPH

SEQ ID NO: 137 - DNA, 2211 bp, synthetic construct
  source 1..2211: mol_type = other DNA
atggctgccgatggttatcttccagattggctcgaggacaaccttagtgaaggaattcgcgagtggtgggctttgaaacctggagcccctcaacccaaggcaaatcaacaacatcaagacaacgctcgaggtcttgtgcttccgggttacaaataccttggacccggcaacggactcgacaagggggagccggtcaacgcagcagacgcggcggccctcgagcacgacaaggcctacgaccagcagctcaaggccggagacaacccgtacctcaagtacaaccacgccgacgccgagttccaggagcggctcaaagaagatacgtcttttgggggcaacctcgggcgagcagtcttccaggccaaaaagaggcttcttgaacctcttggtctggttgaggaagcggctaagacggctcctggaaagaagaggcctgtagagcagtctcctcaggaaccggactcctccgcgggtattggcaaatcgggtgcacagcccgctaaaaagagactcaatttcggtcagactggcgacacagagtcagtcccagaccctcaaccaatcggagaacctcccgcagccccctcaggtgtgggatctcttacaatggcttcaggtggtggcgcaccagtggcagacaataacgaaggtgccgatggagtgggtagttcctcgggaaattggcattgcgattcccaatggctgggggacagagtcatcaccaccagcacccgaacctgggccctgcccacctacaacaatcacctctacaagcaaatctccaacagcacatctggaggatcttcaaatgacaacgcctacttcggctacagcaccccctgggggtattttgacttcaacagattccactgccacttctcaccacgtgactggcagcgactcatcaacaacaactggggattccggcctaagcgactcaacttcaagctcttcaacattcaggtcaaagaggttacggacaacaatggagtcaagaccatcgccaataaccttaccagcacggtccaggtcttcacggactcagactatcagctcccgtacgtgctcgggtcggctcacgagggctgcctcccgccgttcccagcggacgttttcatgattcctcagtacgggtatctgacgcttaatgatggaagccaggccgtgggtcgttcgtccttttactgcctggaatatttcccgtcgcaaatgctaagaacgggtaacaacttccagttcagctacgagtttgagaacgtacctttccatagcagctacgctcacagccaaagcctggaccgactaatgaatccactcatcgaccaatacttgtactatctctcaaagactattaacggttctggacagaatcaacaaacgctaaaattcagtgtggccggacccagcaacatggctgtccagggaagaaactacatacctggacccagctaccgacaacaacgtgtctcaaccactgtgactcaaaacaacaacagcgaatttgcttggcctggagcttcttcttgggctctcaatggacgtaatagcttgatgaatcctggacctgctatggccagccacaaagaaggagaggaccgtttctttcctttgtctggatctttaatttttggcaaacaaggaactggaagagacaacgtggatgcggacaaagtcatgataaccaacgaagaagaaattaaaactactaacccggtagcaacggagtcctatggacaagtggccacaaaccaccagagtgcccaagcacaggcgcagaccggctgggttcaaaaccaaggaatacttccgggtatggtttggcaggacagagatgtgtacctgcaaggacccatttgggccaaaattcctcacacggacggcaactttcacccttctccgctgatgggagggtttggaatgaagcacccgcctcctcagatcctcatcaaaaacacacctgtacctgcggatcctccaacggccttcaacaaggacaagctgaactctttcatcacccagtattctactggccaagtcagcgtggagatcgagtgggagctgcagaaggaaaacagcaagcgctggaacccggagatccagtacacttccaactattacaagtctaataatgttgaatttgctgttaatactgaaggtgtatatagtgaaccccgccccattggcaccagatacctgactcgtaatctgtaa

SEQ ID NO: 138 - protein, 736 aa, synthetic construct
MAADGYLPDWLEDNLSEGIREWWALKPGAPQPKANQQHQDNARGLVLPGYKYLGPGNGLDKGEPVNAADAAALEHDKAYDQQLKAGDNPYLKYNHADAEFQERLKEDTSFGGNLGRAVFQAKKRLLEPLGLVEEAAKTAPGKKRPVEQSPQEPDSSAGIGKSGAQPAKKRLNFGQTGDTESVPDPQPIGEPPAAPSGVGSLTMASGGGAPVADNNEGADGVGSSSGNWHCDSQWLGDRVITTSTRTWALPTYNNHLYKQISNSTSGGSSNDNAYFGYSTPWGYFDFNRFHCHFSPRDWQRLINNNWGFRPKRLNFKLFNIQVKEVTDNNGVKTIANNLTSTVQVFTDSDYQLPYVLGSAHEGCLPPFPADVFMIPQYGYLTLNDGSQAVGRSSFYCLEYFPSQMLRTGNNFQFSYEFENVPFHSSYAHSQSLDRLMNPLIDQYLYYLSKTINGSGQNQQTLKFSVAGPSNMAVQGRNYIPGPSYRQQRVSTTVTQNNNSEFAWPGASSWALNGRNSLMNPGPAMASHKEGEDRFFPLSGSLIFGKQGTGRDNVDADKVMITNEEEIKTTNPVATESYGQVATNHQSAQAQAQTGWVQNQGILPGMVWQDRDVYLQGPIWAKIPHTDGNFHPSPLMGGFGMKHPPPQILIKNTPVPADPPTAFNKDKLNSFITQYSTGQVSVEIEWELQKENSKRWNPEIQYTSNYYKSNNVEFAVNTEGVYSEPRPIGTRYLTRNL

SEQ ID NO: 139 - protein, 5 aa, synthetic construct
SASPH

SEQ ID NO: 140 - protein, 5 aa, synthetic construct
YDSPH

SEQ ID NO: 141 - protein, 5 aa, synthetic construct
HGSPH

SEQ ID NO: 142 - protein, 5 aa, synthetic construct
RDSPH

SEQ ID NO: 143 - protein, 5 aa, synthetic construct
NDSPH

SEQ ID NO: 144 - protein, 5 aa, synthetic construct
PDSPH

SEQ ID NO: 145 - protein, 5 aa, synthetic construct
MGSPH

SEQ ID NO: 146 - protein, 5 aa, synthetic construct
QVSPH

SEQ ID NO: 147 - protein, 5 aa, synthetic construct
HNSPH

SEQ ID NO: 148 - protein, 5 aa, synthetic construct
HPSPH

SEQ ID NO: 149 - protein, 5 aa, synthetic construct
HSSPH

SEQ ID NO: 150 - protein, 6 aa, synthetic construct
GSGSPH

SEQ ID NO: 151 - protein, 6 aa, synthetic construct
GHDSPH

SEQ ID NO: 152 - protein, 6 aa, synthetic construct
GQDSPH

SEQ ID NO: 153 - protein, 6 aa, synthetic construct
VSGSPH

SEQ ID NO: 154 - protein, 6 aa, synthetic construct
CSGSPH

SEQ ID NO: 155 - protein, 6 aa, synthetic construct
GRGSPH

SEQ ID NO: 156 - protein, 6 aa, synthetic construct
CSHSPH

SEQ ID NO: 157 - protein, 6 aa, synthetic construct
GQSSPH

SEQ ID NO: 158 - protein, 6 aa, synthetic construct
GSHSPH

SEQ ID NO: 159 - protein, 6 aa, synthetic construct
GDDSPH

SEQ ID NO: 160 - protein, 6 aa, synthetic construct
GHESPH

SEQ ID NO: 161 - protein, 6 aa, synthetic construct
GNYSPH

SEQ ID NO: 162 - protein, 6 aa, synthetic construct
RVGSPH

SEQ ID NO: 163 - protein, 6 aa, synthetic construct
GSCSPH

SEQ ID NO: 164 - protein, 6 aa, synthetic construct
GLLSPH

SEQ ID NO: 165 - protein, 6 aa, synthetic construct
MSGSPH

SEQ ID NO: 166 - protein, 6 aa, synthetic construct
RNGSPH

SEQ ID NO: 167 - protein, 6 aa, synthetic construct
TSGSPH

SEQ ID NO: 168 - protein, 6 aa, synthetic construct
ISGSPH

SEQ ID NO: 169 - protein, 6 aa, synthetic construct
GPGSPH

SEQ ID NO: 170 - protein, 6 aa, synthetic construct
ESGSPH

SEQ ID NO: 171 - protein, 6 aa, synthetic construct
SSGSPH

SEQ ID NO: 172 - protein, 6 aa, synthetic construct
GNGSPH

SEQ ID NO: 173 - protein, 6 aa, synthetic construct
ASGSPH

SEQ ID NO: 174 - protein, 6 aa, synthetic construct
NSGSPH

SEQ ID NO: 175 - protein, 6 aa, synthetic construct
LSGSPH

SEQ ID NO: 176 - protein, 6 aa, synthetic construct
GGGSPH

SEQ ID NO: 177 - protein, 6 aa, synthetic construct
KSGSPH

SEQ ID NO: 178 - protein, 6 aa, synthetic construct
HSGSPH

SEQ ID NO: 179 - protein, 6 aa, synthetic construct
GTGSPH

SEQ ID NO: 180 - protein, 6 aa, synthetic construct
PSGSPH

SEQ ID NO: 181 - protein, 6 aa, synthetic construct
GSVSPH

SEQ ID NO: 182 - protein, 6 aa, synthetic construct
RSGSPH

SEQ ID NO: 183 - protein, 6 aa, synthetic construct
GIGSPH

SEQ ID NO: 184 - protein, 6 aa, synthetic construct
WSGSPH

SEQ ID NO: 185 - protein, 6 aa, synthetic construct
DSGSPH

SEQ ID NO: 186 - protein, 6 aa, synthetic construct
IDGSPH

SEQ ID NO: 187 - protein, 6 aa, synthetic construct
GLGSPH

SEQ ID NO: 188 - protein, 6 aa, synthetic construct
DAGSPH

SEQ ID NO: 189 - protein, 6 aa, synthetic construct
DGGSPH

SEQ ID NO: 190 - protein, 6 aa, synthetic construct
MEGSPH

SEQ ID NO: 191 - protein, 6 aa, synthetic construct
ENGSPH

SEQ ID NO: 192 - protein, 6 aa, synthetic construct
GSASPH

SEQ ID NO: 193 - protein, 6 aa, synthetic construct
KNGSPH

SEQ ID NO: 194 - protein, 6 aa, synthetic construct
KEGSPH

SEQ ID NO: 195 - protein, 6 aa, synthetic construct
AIGSPH

SEQ ID NO: 196 - protein, 6 aa, synthetic construct
GYDSPH

SEQ ID NO: 197 - protein, 6 aa, synthetic construct
GHGSPH

SEQ ID NO: 198 - protein, 6 aa, synthetic construct
GRDSPH

SEQ ID NO: 199 - protein, 6 aa, synthetic construct
GNDSPH

SEQ ID NO: 200 - protein, 14 aa, synthetic construct
GSGSPHSKAQNQQT

SEQ ID NO: 201 - protein, 14 aa, synthetic construct
GHDSPHKSGQNQQT

SEQ ID NO: 202 - protein, 14 aa, synthetic construct
GSGSPHARMQNQQT

SEQ ID NO: 203 - protein, 14 aa, synthetic construct
GSGSPHVKSQNQQT

SEQ ID NO: 204 - protein, 14 aa, synthetic construct
GQDSPHKSGQNQQT

SEQ ID NO: 205 - protein, 14 aa, synthetic construct
GSGSPHASRQNQQT

SEQ ID NO: 206 - protein, 14 aa, synthetic construct
GSGSPHASRQNKQT

SEQ ID NO: 207 - protein, 14 aa, synthetic construct
GSGSPHVKIQNQQT

SEQ ID NO: 208 - protein, 14 aa, synthetic construct
GSGSPHSKAKNQQT

SEQ ID NO: 209 - protein, 14 aa, synthetic construct
GSGSPHKKNQNQQT

SEQ ID NO: 210 - protein, 14 aa, synthetic construct
GSGSPHVRMQNQQT

SEQ ID NO: 211 - protein, 14 aa, synthetic construct
GSGSPHASRQKQQT

SEQ ID NO: 212 - protein, 14 aa, synthetic construct
GHSSPHRSGQNQQT

SEQ ID NO: 213 - protein, 14 aa, synthetic construct
GMRTYHLSGQNQQT

SEQ ID NO: 214 - protein, 14 aa, synthetic construct
GSGSPHTRGQNQQT

SEQ ID NO: 215 - protein, 14 aa, synthetic construct
GSGIIPVSSQNQQT

SEQ ID NO: 216 - protein, 14 aa, synthetic construct
GSEYGHKSGQNQQT

SEQ ID NO: 217 - protein, 14 aa, synthetic construct
GRGQNVSSVHRQQT

SEQ ID NO: 218 - protein, 14 aa, synthetic construct
GSSHRFYGGQNQQT

SEQ ID NO: 219 - protein, 14 aa, synthetic construct
GYFVAAWSGQNQQT

SEQ ID NO: 220 - protein, 14 aa, synthetic construct
GSVLHSHAAQNQQT

SEQ ID NO: 221 - protein, 14 aa, synthetic construct
GSGDLVVSTQNQQT

SEQ ID NO: 222 - protein, 14 aa, synthetic construct
GSYGMAASGQNQQT

SEQ ID NO: 223 - protein, 14 aa, synthetic construct
GLNHFGASGQNQQT

SEQ ID NO: 224 - protein, 14 aa, synthetic construct
GSTGSHSAGQNQHT

SEQ ID NO: 225 - protein, 14 aa, synthetic construct
GLAGHTVSGQNQQT

SEQ ID NO: 226 - protein, 14 aa, synthetic construct
GIILGASSGQNQQT

SEQ ID NO: 227 - protein, 14 aa, synthetic construct
GSGVSTYNIQNQQT

SEQ ID NO: 228 - protein, 14 aa, synthetic construct
GSLVSVQTGQNQQT

SEQ ID NO: 229 - protein, 14 aa, synthetic construct
GQSSPHRSGQNQQT

SEQ ID NO: 230 - protein, 14 aa, synthetic construct
GREYGHKSGQNQQT

SEQ ID NO: 231 - protein, 14 aa, synthetic construct
GHTLTLSSGQNQQT

SEQ ID NO: 232 - protein, 14 aa, synthetic construct
GSITLIPSGQNQQT

SEQ ID NO: 233 - protein, 14 aa, synthetic construct
GSNGFTALGQNQQT

SEQ ID NO: 234 - protein, 14 aa, synthetic construct
GSGHSSHSVQNQQT

SEQ ID NO: 235 - protein, 14 aa, synthetic construct
GSGIPQRSGKNQQT

SEQ ID NO: 236 - protein, 14 aa, synthetic construct
GSGDTLHMLQNQQT

SEQ ID NO: 237 - protein, 14 aa, synthetic construct
GERHTVLSGQNQQT

SEQ ID NO: 238 - protein, 14 aa, synthetic construct
GSGMPQSHIQNQQT

SEQ ID NO: 239 - protein, 14 aa, synthetic construct
GSGQLSGIGGNQQT

SEQ ID NO: 240 - protein, 14 aa, synthetic construct
GSGQNRKPASFAQT

SEQ ID NO: 241 - protein, 14 aa, synthetic construct
GSGSVSQLGQNQQT

SEQ ID NO: 242 - protein, 14 aa, synthetic construct
GSDFLGTHGQNQQT

SEQ ID NO: 243 - protein, 14 aa, synthetic construct
GQIVQNPSGQNQQT

SEQ ID NO: 244 - protein, 14 aa, synthetic construct
GSGTQIPSQQNQQT

SEQ ID NO: 245 - protein, 14 aa, synthetic construct
GSGQNQQSAREGLT

SEQ ID NO: 246 - protein, 14 aa, synthetic construct
GSGLGMSTGQNQQT

SEQ ID NO: 247 - protein, 14 aa, synthetic construct
GSGLPVLSGQNQQT

SEQ ID NO: 248 - protein, 14 aa, synthetic construct
GSGHSIRTDQNQQT

SEQ ID NO: 249 - protein, 14 aa, synthetic construct
GSGQSVQTVVNQQT

SEQ ID NO: 250 - protein, 14 aa, synthetic construct
GSGQNRAQSRFQQT

SEQ ID NO: 251 - protein, 14 aa, synthetic construct
GGGDLGRSSQNQQT

SEQ ID NO: 252 - protein, 14 aa, synthetic construct
GGGTKMDSGQNQQT

SEQ ID NO: 253 - protein, 14 aa, synthetic construct
GSGSPHPSRQNQQT

SEQ ID NO: 254 - protein, 14 aa, synthetic construct
GSGQFTNAGMNQQT

SEQ ID NO: 255 - protein, 14 aa, synthetic construct
GGRNGHTVGQNQQT

SEQ ID NO: 256 - protein, 14 aa, synthetic construct
GSGFGPQTGQNQQT

SEQ ID NO: 257 - protein, 14 aa, synthetic construct
GRTDSHTSGQNQQT

SEQ ID NO: 258 - protein, 14 aa, synthetic construct
GYEVLGSSGQNQQT

SEQ ID NO: 259 - protein, 14 aa, synthetic construct
GSVHLSVTGQNQQT

SEQ ID NO: 260 - protein, 14 aa, synthetic construct
GFMSYKGSGQNQQT

SEQ ID NO: 261 - protein, 14 aa, synthetic construct
GNIAGSVSGQNQQT

SEQ ID NO: 262 - protein, 14 aa, synthetic construct
GSGSHRDVSQNQQT

SEQ ID NO: 263 - protein, 14 aa, synthetic construct
GGLGSMSSGQNQQT

SEQ ID NO: 264 - protein, 14 aa, synthetic construct
GSGHLPQSAQNQQT

SEQ ID NO: 265 - protein, 14 aa, synthetic construct
GGVLVGGSGQNQQT

SEQ ID NO: 266 - protein, 14 aa, synthetic construct
GTHPYTSSGQNQQT

SEQ ID NO: 267 - protein, 14 aa, synthetic construct
GSGQNQQLKENRST

SEQ ID NO: 268 - protein, 14 aa, synthetic construct
GSGQNQQTSPHNHT

SEQ ID NO: 269 - protein, 14 aa, synthetic construct
GSGTLYPQSQNQQT

SEQ ID NO: 270 - protein, 14 aa, synthetic construct
GSGQNQQSNWITKT

SEQ ID NO: 271 - protein, 14 aa, synthetic construct
GSGYTSLFLQNQQT

SEQ ID NO: 272 - protein, 14 aa, synthetic construct
GSGVMTHVLQNQQT

SEQ ID NO: 273 - protein, 14 aa, synthetic construct
GSVSDVRAGQNQQT

SEQ ID NO: 274 - protein, 14 aa, synthetic construct
GSGQSHMATLNQQT

SEQ ID NO: 275 - protein, 14 aa, synthetic construct
GSGLSVHLAQNQQT

SEQ ID NO: 276 - protein, 14 aa, synthetic construct
GSGLSHATQQNQQT

SEQ ID NO: 277 - protein, 14 aa, synthetic construct
GSGLSVQSGQNQQT

SEQ ID NO: 278 - protein, 14 aa, synthetic construct
GSGHMTYREKNQQT

SEQ ID NO: 279 - protein, 14 aa, synthetic construct
GSKGVPTPGQNQQT

SEQ ID NO: 280 - protein, 14 aa, synthetic construct
GSGLLPLSSQNQQT

SEQ ID NO: 281 - protein, 14 aa, synthetic construct
GNGLYAVSGQNQQT

SEQ ID NO: 282 - protein, 14 aa, synthetic construct
GFNGSPSSGQNQQT

SEQ ID NO: 283 - protein, 14 aa, synthetic construct
GSGQIRHSDQNQQT

SEQ ID NO: 284 - protein, 14 aa, synthetic construct
GGQVAPSSGQNQQT

SEQ ID NO: 285 - protein, 14 aa, synthetic construct
GSFSMHTHGQNQQT

SEQ ID NO: 286 - protein, 14 aa, synthetic construct
GSGQNQQVIQGSNT

SEQ ID NO: 287 - protein, 14 aa, synthetic construct
GRVLHSHAGQNQQT

SEQ ID NO: 288 - protein, 14 aa, synthetic construct
GSGQNQQTSLQDQT

SEQ ID NO: 289 - protein, 14 aa, synthetic construct
GSGLGRAPVQNQQT

SEQ ID NO: 290 - protein, 14 aa, synthetic construct
GNGFSSASGQNQQT

SEQ ID NO: 291 - protein, 14 aa, synthetic construct
GSGQMASRESNQQT

SEQ ID NO: 292 - protein, 14 aa, synthetic construct
GPGLPNHSGQNQQT

SEQ ID NO: 293 - protein, 14 aa, synthetic construct
GNIQWQGSGQNQQT

SEQ ID NO: 294 - protein, 14 aa, synthetic construct
GMSAHMSSGQNQQT

SEQ ID NO: 295 - protein, 14 aa, synthetic construct
GHSFVNRSGQNQQT

SEQ ID NO: 296 - protein, 14 aa, synthetic construct
GRAVMDHSGQNQQT

SEQ ID NO: 297 - protein, 14 aa, synthetic construct
GALTVMQSGQNQQT

SEQ ID NO: 298 - protein, 14 aa, synthetic construct
GSGQRSPVLPNQQT

SEQ ID NO: 299 - protein, 14 aa, synthetic construct
GSGQNGHLSLKQQT

SEQ ID NO: 300 - protein, 14 aa, synthetic construct
GSLPRGTSDQNQQT

SEQ ID NO: 301 - protein, 14 aa, synthetic construct
GVAGSLVSGQNQQT

SEQ ID NO: 302 - protein, 14 aa, synthetic construct
GRGGIPQSGQNQQT

SEQ ID NO: 303 - protein, 14 aa, synthetic construct
GSGQYASSIPNQQT

SEQ ID NO: 304 - protein, 14 aa, synthetic construct
GTDFGRQSSQNQQT

SEQ ID NO: 305 - protein, 14 aa, synthetic construct
GIFMQTPSGQNQQT

SEQ ID NO: 306 - protein, 14 aa, synthetic construct
GSGQNQQTRLVDLT

SEQ ID NO: 307 - protein, 14 aa, synthetic construct
GTREMPLSGQNQQT

SEQ ID NO: 308 - protein, 14 aa, synthetic construct
GSRLVHVHGQNQQT

SEQ ID NO: 309 - protein, 14 aa, synthetic construct
GSGRLVPNGPNQQT

SEQ ID NO: 310 - protein, 14 aa, synthetic construct
GSGYLRESPQNQQT

SEQ ID NO: 311 - protein, 14 aa, synthetic construct
GARIQNASGQKQQT

SEQ ID NO: 312 - protein, 14 aa, synthetic construct
GLSNPMPSGQNQQT

SEQ ID NO: 313 - protein, 14 aa, synthetic construct
GSTVQDTRGQNQQT

SEQ ID NO: 314 - protein, 14 aa, synthetic construct
GPFGMPSSGQNQQT

SEQ ID NO: 315 - protein, 14 aa, synthetic construct
GSGQNHGVLSNQQT

SEQ ID NO: 316 - protein, 14 aa, synthetic construct
GSGYSMSQAQNQQT

SEQ ID NO: 317 - protein, 14 aa, synthetic construct
GSGMLTHTLQNQQT

SEQ ID NO: 318 - protein, 14 aa, synthetic construct
GRGSPHASRQNQQT

SEQ ID NO: 319 - protein, 14 aa, synthetic construct
GLSWPSTSGQNQQT

SEQ ID NO: 320 - protein, 14 aa, synthetic construct
GNSMERTSGQNQQT

SEQ ID NO: 321 - protein, 14 aa, synthetic construct
GSGMSPSTLQNQQT

SEQ ID NO: 322 - protein, 14 aa, synthetic construct
GSGHGQVLSQNQQT

SEQ ID NO: 323 - protein, 14 aa, synthetic construct
GRGQIYSTGGNQQT

SEQ ID NO: 324 - protein, 14 aa, synthetic construct
GVVAAHNSGQNQQT

SEQ ID NO: 325 - protein, 14 aa, synthetic construct
GDSSLRHSGQNQQT

SEQ ID NO: 326 - protein, 14 aa, synthetic construct
GSLVSQGAGQNQQT

SEQ ID NO: 327 - protein, 14 aa, synthetic construct
GSLLQAHSGQNQQT

SEQ ID NO: 328 - protein, 14 aa, synthetic construct
GSGHIYVGIQNQQT

SEQ ID NO: 329 - protein, 14 aa, synthetic construct
GHHTTVQSGQNQQT

SEQ ID NO: 330 - protein, 14 aa, synthetic construct
GSRQSKRNELNQQT

SEQ ID NO: 331 - protein, 14 aa, synthetic construct
GSGQNQQHVSSPRT

SEQ ID NO: 332 - protein, 14 aa, synthetic construct
GSSKELLWGQNQQT

SEQ ID NO: 333 - protein, 14 aa, synthetic construct
GSLSTPSSGQNQQT

SEQ ID NO: 334 - protein, 14 aa, synthetic construct
GSIGYAGQGQNQQT

SEQ ID NO: 335 - protein, 14 aa, synthetic construct
GSGQNQRVSNSQQT

SEQ ID NO: 336 - protein, 14 aa, synthetic construct
GSGYASHVQQNQQT

SEQ ID NO: 337 - protein, 14 aa, synthetic construct
GSGEYSRSGQNQQT

SEQ ID NO: 338 - protein, 14 aa, synthetic construct
GSVSTHSSGQNQQT

SEQ ID NO: 339 - protein, 14 aa, synthetic construct
GSGQNQHSLGNYQT

SEQ ID NO: 340 - protein, 14 aa, synthetic construct
GSGGLDTRGQNQQT

SEQ ID NO: 341 - protein, 14 aa, synthetic construct
GNILHATSGQNQQT

SEQ ID NO: 342 - protein, 14 aa, synthetic construct
GSGQSYTMTQNQQT

SEQ ID NO: 343 - protein, 14 aa, synthetic construct
GSGQNQHSAPNSQT

SEQ ID NO: 344 - protein, 14 aa, synthetic construct
GSGQNQQTMDHNRT

SEQ ID NO: 345 - protein, 14 aa, synthetic construct
GSNGGVGTGQNQQT

SEQ ID NO: 346 - protein, 14 aa, synthetic construct
GAGSIIPSGQNQQT

SEQ ID NO: 347 - protein, 14 aa, synthetic construct
GSGQTHGGQHNQQT

SEQ ID NO: 348 - protein, 14 aa, synthetic construct
GSNLSFQSGQNQQT

SEQ ID NO: 349 - protein, 14 aa, synthetic construct
GATLQVHSGQNQQT

SEQ ID NO: 350 - protein, 14 aa, synthetic construct
GSGFNQRSEQNQQT

SEQ ID NO: 351 - protein, 14 aa, synthetic construct
GSGSLRDFDQNQQT

SEQ ID NO: 352 - protein, 14 aa, synthetic construct
GSGDSITGKQNQQT

SEQ ID NO: 353 - protein, 14 aa, synthetic construct
GSGQDRNIVQNQQT

SEQ ID NO: 354 - protein, 14 aa, synthetic construct
GSGLSHSHQQNQQT

SEQ ID NO: 355 - protein, 14 aa, synthetic construct
GSGQNQQTGMSSVK

SEQ ID NO: 356 - protein, 14 aa, synthetic construct
GSVTHGISGQNQQT

SEQ ID NO: 357 - protein, 14 aa, synthetic construct
GVVAHQPSGQNQQT

SEQ ID NO: 358 - protein, 14 aa, synthetic construct
GSGPILGQLQNQQT

SEQ ID NO: 359 - protein, 14 aa, synthetic construct
GSGHVPNSGLNQQT

SEQ ID NO: 360 - protein, 14 aa, synthetic construct
GDAGVRSSGQNQQT

SEQ ID NO: 361 - protein, 14 aa, synthetic construct
GSGSQLMSLQNQQT

SEQ ID NO: 362 - protein, 14 aa, synthetic construct
GSGLDYSQRQNQQT

SEQ ID NO: 363 - protein, 14 aa, synthetic construct
GSGQSSGRLINKQT

SEQ ID NO: 364 - protein, 14 aa, synthetic construct
GSSVSPSSGQNQQT

SEQ ID NO: 365 - protein, 14 aa, synthetic construct
GSGQVVGLSGNQQT

SEQ ID NO: 366 - protein, 14 aa, synthetic construct
GSNMGVPLGQNQQT

SEQ ID NO: 367 - protein, 14 aa, synthetic construct
GSFYPSSTGQNQQT

SEQ ID NO: 368 - protein, 14 aa, synthetic construct
GSGQNQQTRLTDLT

SEQ ID NO: 369 - protein, 14 aa, synthetic construct
GPTNGRSSGQNQQT

SEQ ID NO: 370 - protein, 14 aa, synthetic construct
GSGLLHGKLQNQQT

SEQ ID NO: 371 - protein, 14 aa, synthetic construct
GANMGHVSGQNQQT

SEQ ID NO: 372 - protein, 14 aa, synthetic construct
GSGQNQQSGRGDLT

SEQ ID NO: 373 - protein, 14 aa, synthetic construct
GSHGHYASGQKQQT

SEQ ID NO: 374 - protein, 14 aa, synthetic construct
GSGDLRISPQNQQT

SEQ ID NO: 375 - protein, 14 aa, synthetic construct
GSGMPVILGQNQQT

SEQ ID NO: 376 - protein, 14 aa, synthetic construct
GRGVITSSGQNHQT

SEQ ID NO: 377 - protein, 14 aa, synthetic construct
GSGHSVSGPQNQQT

SEQ ID NO: 378 - protein, 14 aa, synthetic construct
GSRNGHTVGRNQQT

SEQ ID NO: 379 - protein, 14 aa, synthetic construct
GAGVHMVSGQNQQT

SEQ ID NO: 380 - protein, 14 aa, synthetic construct
GSGQNHRPSVLQQT

SEQ ID NO: 381 - protein, 14 aa, synthetic construct
GSGSPRDSIQNQQT

SEQ ID NO: 382 - protein, 14 aa, synthetic construct
GSGQGIHSSVNQQT

SEQ ID NO: 383 - protein, 14 aa, synthetic construct
GSGQQLSITPNQQT

SEQ ID NO: 384 - protein, 14 aa, synthetic construct
GGYHSQTSGQNQQT

SEQ ID NO: 385 - protein, 14 aa, synthetic construct
GSLHHDNHGQNQQT

SEQ ID NO: 386 - protein, 14 aa, synthetic construct
GIMARDSSGQNQQT

SEQ ID NO: 387 - protein, 14 aa, synthetic construct
GVVHITNSGQNQQT

SEQ ID NO: 388 - protein, 14 aa, synthetic construct
GSGQNQHSAPFNQT

SEQ ID NO: 389 - protein, 14 aa, synthetic construct
GSGQTSGLKQNQQT

SEQ ID NO: 390 - protein, 14 aa, synthetic construct
GSGQNQQTSLSNTA

SEQ ID NO: 391 - protein, 14 aa, synthetic construct
GSGQNQAVHNKSQT

SEQ ID NO: 392 - protein, 14 aa, synthetic construct
GVHTHLPSGQNQQT

SEQ ID NO: 393 - protein, 14 aa, synthetic construct
GHLTMHNSGQNHQT

SEQ ID NO: 394 - protein, 14 aa, synthetic construct
GSGSSSRPYQNQQT

SEQ ID NO: 395 - protein, 14 aa, synthetic construct
GILLATPSGQNQQT

SEQ ID NO: 396 - protein, 14 aa, synthetic construct
GSGQNAGSFPNQQT

SEQ ID NO: 397 - protein, 14 aa, synthetic construct
GSRDGHTVGQNQQT

SEQ ID NO: 398 - protein, 14 aa, synthetic construct
GSLLISTSGQNQQT

SEQ ID NO: 399 - protein, 14 aa, synthetic construct
GSGAMPSHGQNQQT

SEQ ID NO: 400 - protein, 14 aa, synthetic construct
GALVSPISGQNQQT

SEQ ID NO: 401 - protein, 14 aa, synthetic construct
GSLSSHGVGQNQQT

SEQ ID NO: 402 - protein, 14 aa, synthetic construct
GSGQNQQASLAMRT

SEQ ID NO: 403 - protein, 14 aa, synthetic construct
GPGLGSHSGQNQQT

SEQ ID NO: 404 - protein, 14 aa, synthetic construct
GHDSQHKSGQNQQT

SEQ ID NO: 405 - protein, 14 aa, synthetic construct
GSGLTLSATQNQQT

SEQ ID NO: 406 - protein, 14 aa, synthetic construct
GSGQVVAHVGNQQT

SEQ ID NO: 407 - protein, 14 aa, synthetic construct
GSGLRTMTTQNQQT

SEQ ID NO: 408 - protein, 14 aa, synthetic construct
GSGQVGRLLQNQQT

SEQ ID NO: 409 - protein, 14 aa, synthetic construct
GSGQLSHQSVNQQT

SEQ ID NO: 410 - protein, 14 aa, synthetic construct
GSGDRYQTLQNQQT

SEQ ID NO: 411 - protein, 14 aa, synthetic construct
GSGQNQQLKSSAQT

SEQ ID NO: 412 - protein, 14 aa, synthetic construct
GSGQNQYSIPVAQT

SEQ ID NO: 413 - protein, 14 aa, synthetic construct
GSGERLHLTQNQQT

SEQ ID NO: 414 - protein, 14 aa, synthetic construct
GSGHNQQVRTAPNT

SEQ ID NO: 415 - protein, 14 aa, synthetic construct
GGLSHVMSGQNQQT

SEQ ID NO: 416 - protein, 14 aa, synthetic construct
GSGQSHRDVLNQQT

SEQ ID NO: 417 - protein, 14 aa, synthetic construct
GSGQNLAGRMDQQT

SEQ ID NO: 418 - protein, 14 aa, synthetic construct
GSGQNQQTNRGNPM

SEQ ID NO: 419 - protein, 14 aa, synthetic construct
GSGQSYQRDHNQQT

SEQ ID NO: 420 - protein, 14 aa, synthetic construct
GSLLSAGMGQNQHT

SEQ ID NO: 421 - protein, 14 aa, synthetic construct
GSGQNQQTAIYRNI

SEQ ID NO: 422 - protein, 14 aa, synthetic construct
GSGQNQQTSGTTNC

SEQ ID NO: 423 - protein, 14 aa, synthetic construct
GMTSHSVSGQNQQT

SEQ ID NO: 424 - protein, 14 aa, synthetic construct
GSSQSTGYQPNQQT

SEQ ID NO: 425 - protein, 14 aa, synthetic construct
GSLKPTTLGQNQQT

SEQ ID NO: 426 - protein, 14 aa, synthetic construct
GRMFSLGSGQNQQT

SEQ ID NO: 427 - protein, 14 aa, synthetic construct
GSGQNQQTALGVKC

SEQ ID NO: 428 - protein, 14 aa, synthetic construct
GAMVSHSSGQNQQT

SEQ ID NO: 429 - protein, 14 aa, synthetic construct
GSGQNQQRNSDSVT

SEQ ID NO: 430 - protein, 14 aa, synthetic construct
GSGQSMTLHLNQQT

SEQ ID NO: 431 - protein, 14 aa, synthetic construct
GSGQVHQAEVNQQT

SEQ ID NO: 432 - protein, 14 aa, synthetic construct
GSGQNQSQNHLQQT

SEQ ID NO: 433 - protein, 14 aa, synthetic construct
GSLLTTASGQNQQT

SEQ ID NO: 434 - protein, 14 aa, synthetic construct
GSGLIRTAAQNQQT

SEQ ID NO: 435 - protein, 14 aa, synthetic construct
GSGQNQQTVSRQST

SEQ ID NO: 436 - protein, 14 aa, synthetic construct
GSGQYANHGINQQT

SEQ ID NO: 437 - protein, 14 aa, synthetic construct
GSRSTGPSGQNQQT

SEQ ID NO: 438 - protein, 14 aa, synthetic construct
GRGVQQKLQQNQQT

SEQ ID NO: 439 - protein, 14 aa, synthetic construct
GSGQNQQVHLSTGT

SEQ ID NO: 440 - protein, 14 aa, synthetic construct
GSGQNQQLSAKSST

SEQ ID NO: 441 - protein, 14 aa, synthetic construct
GSGYKAARPQNQQT

SEQ ID NO: 442 - protein, 14 aa, synthetic construct
GSAGISPSGQNQQT

SEQ ID NO: 443 - protein, 14 aa, synthetic construct
GSGQNRAHAFLQQT

SEQ ID NO: 444 - protein, 14 aa, synthetic construct
GSGLSGITMQNQQT

SEQ ID NO: 445 - protein, 14 aa, synthetic construct
GPGSAHSSGQNQQT

SEQ ID NO: 446 - protein, 14 aa, synthetic construct
GSSHTQALGQNQQT

SEQ ID NO: 447 - protein, 14 aa, synthetic construct
GSGVHGVSSQNQQT

SEQ ID NO: 448 - protein, 14 aa, synthetic construct
GSSGRDMGGQNQQT

SEQ ID NO: 449 - protein, 14 aa, synthetic construct
GERAFPTSGQNQQT

SEQ ID NO: 450 - protein, 14 aa, synthetic construct
GGRIVSLSGQNQQT

SEQ ID NO: 451 - protein, 14 aa, synthetic construct
GSGQNSYSHTSQQT

SEQ ID NO: 452 - protein, 14 aa, synthetic construct
GLGYPGSSGQNQQT

SEQ ID NO: 453 - protein, 14 aa, synthetic construct
GSGPQSHTGQNQQT

SEQ ID NO: 454 - protein, 14 aa, synthetic construct
GSGQNQQLSRDAST

SEQ ID NO: 455 - protein, 14 aa, synthetic construct
GSGQILHSVPNQQT

SEQ ID NO: 456 - protein, 14 aa, synthetic construct
GSGFHTDSRQNQQT

SEQ ID NO: 457 - protein, 14 aa, synthetic construct
GSGQSHSLATNQQT

SEQ ID NO: 458 - protein, 14 aa, synthetic construct
GSGQNQQTLSKPWT

SEQ ID NO: 459 - protein, 14 aa, synthetic construct
GSGHAAISQQNQQT

SEQ ID NO: 460 - protein, 14 aa, synthetic construct
GSGQNQQQIGGNST

SEQ ID NO: 461 - protein, 14 aa, synthetic construct
GGGPMAGSGQNQQT

SEQ ID NO: 462 - protein, 14 aa, synthetic construct
GMRMEYQSGQNQQT

SEQ ID NO: 463 - protein, 14 aa, synthetic construct
GSGQNQQGTLLHQT

SEQ ID NO: 464 - protein, 14 aa, synthetic construct
GSGQNQRSSGGVQT

SEQ ID NO: 465 - protein, 14 aa, synthetic construct
GSGQNQRGALATQT

SEQ ID NO: 466 - protein, 14 aa, synthetic construct
GSGTVHAATQNQQT

SEQ ID NO: 467 - protein, 14 aa, synthetic construct
GSRMTQQFGQNQQT

SEQ ID NO: 468 - protein, 14 aa, synthetic construct
GSSSPGASGQNQQT

SEQ ID NO: 469 - protein, 14 aa, synthetic construct
GHPSPHVSGQNQQT

SEQ ID NO: 470 - protein, 14 aa, synthetic construct
GSGSHHASRQNQQT

SEQ ID NO: 471 - protein, 14 aa, synthetic construct
GAVGHSYSGQNQQT

SEQ ID NO: 472 - protein, 14 aa, synthetic construct
GSRSQYDIGQNQQT

SEQ ID NO: 473 - protein, 14 aa, synthetic construct
GSGQGPQERGNQQT

SEQ ID NO: 474 - protein, 14 aa, synthetic construct
GSIAHVGTGQNQQT

SEQ ID NO: 475 - protein, 14 aa, synthetic construct
GSGQNQQKQNHGNT

SEQ ID NO: 476 - protein, 14 aa, synthetic construct
GSGQNQQALGSQRT

SEQ ID NO: 477 - protein, 14 aa, synthetic construct
GSGAITHMPQNQQT

SEQ ID NO: 478 - protein, 14 aa, synthetic construct
GSGQRNPLLLNQQT

SEQ ID NO: 479 - protein, 14 aa, synthetic construct
GSSGIPVSHQNQQT

SEQ ID NO: 480 - protein, 14 aa, synthetic construct
GVHSLTPSGQNQQT

SEQ ID NO: 481 - protein, 14 aa, synthetic construct
GVIVLHGSGQNQQT

SEQ ID NO: 482 - protein, 14 aa, synthetic construct
GGTRVVDSGQNQQT

SEQ ID NO: 483 - protein, 14 aa, synthetic construct
GSGGVTYQSQNQQT

SEQ ID NO: 484 - protein, 14 aa, synthetic construct
GSGQNQAGHGPGQT

SEQ ID NO: 485 - protein, 14 aa, synthetic construct
GSGQLVTSGPNQQT

SEQ ID NO: 486 - protein, 14 aa, synthetic construct
GSGIAAQRTQNQQT

SEQ ID NO: 487 - protein, 14 aa, synthetic construct
GSTPAGVGGQNQQT

SEQ ID NO: 488 - protein, 14 aa, synthetic construct
GSGQNQQTSTGVHS

SEQ ID NO: 489 - protein, 14 aa, synthetic construct
GSGQIRQLVDNQQT

SEQ ID NO: 490 - protein, 14 aa, synthetic construct
GSLIGMQSGQNQQT

SEQ ID NO: 491 - protein, 14 aa, synthetic construct
GSGQIKGKMDNQQT

SEQ ID NO: 492 - protein, 14 aa, synthetic construct
GSGSDMSSWQNQQT

SEQ ID NO: 493 - protein, 14 aa, synthetic construct
GRGQNQQHTGLATT

SEQ ID NO: 494 - protein, 14 aa, synthetic construct
GSGQNQQTLYSSNT

SEQ ID NO: 495 - protein, 14 aa, synthetic construct
GSGQTQVLKSNQQT

SEQ ID NO: 496 - protein, 14 aa, synthetic construct
GSRTLSNVGQNQQT

SEQ ID NO: 497 - protein, 14 aa, synthetic construct
GSGVQHSLPQNQQT

SEQ ID NO: 498 - protein, 14 aa, synthetic construct
GNYLHQASGQNQQT

SEQ ID NO: 499 - protein, 14 aa, synthetic construct
GSGGTSVHQQNQQT

SEQ ID NO: 500 - protein, 14 aa, synthetic construct
GMDHSRPSGQNQQT

SEQ ID NO: 501 - protein, 14 aa, synthetic construct
GSGQNQQSMGTFTT

SEQ ID NO: 502 - protein, 14 aa, synthetic construct
GSGQNQQTPLRPPT

SEQ ID NO: 503 - protein, 14 aa, synthetic construct
GSGQNQHHSVSQQT

SEQ ID NO: 504 - protein, 14 aa, synthetic construct
GSGQLRSLSTNQQT

SEQ ID NO: 505 - protein, 14 aa, synthetic construct
GSGSPRQLSQNQQT

SEQ ID NO: 506 - protein, 14 aa, synthetic construct
GSGQNQQTTASSHT

SEQ ID NO: 507 - protein, 14 aa, synthetic construct
GRGQVVSTHQNQQT

SEQ ID NO: 508 - protein, 14 aa, synthetic construct
GSAQVSMVGQNQQT

SEQ ID NO: 509 - protein, 14 aa, synthetic construct
GSSTLVTIGKNQQT

SEQ ID NO: 510 - protein, 14 aa, synthetic construct
GFAHQASSGQNQQT

SEQ ID NO: 511 - protein, 14 aa, synthetic construct
GSGQPVLSISNQQT

SEQ ID NO: 512 - protein, 14 aa, synthetic construct
GSGQSHRSELNQQT

SEQ ID NO: 513 - protein, 14 aa, synthetic construct
GSSVGSPIGQNQQT

SEQ ID NO: 514 - protein, 14 aa, synthetic construct
GSGMPIRNVQNQQT

SEQ ID NO: 515 - protein, 14 aa, synthetic construct
GSSTRVDSGQNQQT

SEQ ID NO: 516 - protein, 14 aa, synthetic construct
GSGQNQQTAMRSTT

SEQ ID NO: 517 - protein, 14 aa, synthetic construct
GSGQNQQHSSSHLT

SEQ ID NO: 518 - protein, 14 aa, synthetic construct
GSRNGHAVGQNQQT

SEQ ID NO: 519 - protein, 14 aa, synthetic construct
GLGAYQSSGQNQQT

SEQ ID NO: 520 - protein, 14 aa, synthetic construct
GPGLSGHSGQNQQT

SEQ ID NO: 521 - protein, 14 aa, synthetic construct
GSTGIVSSGQNQQT

SEQ ID NO: 522 - protein, 14 aa, synthetic construct
GSRTTQVIGQNQQT

SEQ ID NO: 523 - protein, 14 aa, synthetic construct
GSGLLHRAQQNQQT

SEQ ID NO: 524 - protein, 14 aa, synthetic construct
GSGQNAQQAAAQQT

SEQ ID NO: 525 - protein, 14 aa, synthetic construct
GSGQNQQSALRTQT

SEQ ID NO: 526 - protein, 14 aa, synthetic construct
GSGFLSDTRQNQQT

SEQ ID NO: 527 - protein, 14 aa, synthetic construct
GSGLLYHDQQNQQT

SEQ ID NO: 528 - protein, 14 aa, synthetic construct
GSGQNQHYSLHKQT

SEQ ID NO: 529 - protein, 14 aa, synthetic construct
GSGHSPLPQQNQQT

SEQ ID NO: 530 - protein, 14 aa, synthetic construct
GNGHSMRPNQNQQT

SEQ ID NO: 531 - protein, 14 aa, synthetic construct
GSGLKWSTLQNQQT

SEQ ID NO: 532 - protein, 14 aa, synthetic construct
GSGQMGRQAVNQQT

SEQ ID NO: 533 - protein, 14 aa, synthetic construct
GSGQNQQTSGVLTL

SEQ ID NO: 534 - protein, 14 aa, synthetic construct
GSGQNQQALHNPHT

SEQ ID NO: 535 - protein, 14 aa, synthetic construct
GSGQNQQVIPNSKT

SEQ ID NO: 536 - protein, 14 aa, synthetic construct
GSPLQDRVGQNQQT

SEQ ID NO: 537 - protein, 14 aa, synthetic construct
GSGQNQYSSTNPQT

SEQ ID NO: 538 - protein, 14 aa, synthetic construct
GAMTVTISGQNQQT

SEQ ID NO: 539 - protein, 14 aa, synthetic construct
GSGQNQQLQTLIRT

SEQ ID NO: 540 - protein, 14 aa, synthetic construct
GSGLRQTSQQNQQT

SEQ ID NO: 541 - protein, 14 aa, synthetic construct
GSGQNQQTGLRQQT

SEQ ID NO: 542 - protein, 14 aa, synthetic construct
GSGQTRQMKDNQQT

SEQ ID NO: 543 - protein, 14 aa, synthetic construct
GSGQNHGLQSGQQT

SEQ ID NO: 544 - protein, 14 aa, synthetic construct
GSGQSHRQPENQQT

SEQ ID NO: 545 - protein, 14 aa, synthetic construct
GSGQDRHIVQNQQT

SEQ ID NO: 546 - protein, 14 aa, synthetic construct
GSGQNQQLPHSNLT

SEQ ID NO: 547 - protein, 14 aa, synthetic construct
GSGQLSVPYDNQQT

SEQ ID NO: 548 - protein, 14 aa, synthetic construct
GSGRNPQTQPLQQT

SEQ ID NO: 549 - protein, 14 aa, synthetic construct
GSGQPYSTGLNQQT

SEQ ID NO: 550 - protein, 14 aa, synthetic construct
GSGQNQQTHGGLRD

SEQ ID NO: 551 - protein, 14 aa, synthetic construct
GAYGMVSSGQNQQT

SEQ ID NO: 552 - protein, 14 aa, synthetic construct
GSGIQSSYSQNQQT

SEQ ID NO: 553 - protein, 14 aa, synthetic construct
GPRLSDQSGQNQQT

SEQ ID NO: 554 - protein, 14 aa, synthetic construct
GSGQNQQTHPSPCT

SEQ ID NO: 555 - protein, 14 aa, synthetic construct
GSGQSFQMHTNQQT

SEQ ID NO: 556 - protein, 14 aa, synthetic construct
GSGQNQQTGNPKHT

SEQ ID NO: 557 - protein, 14 aa, synthetic construct
GFSSAVHSGQNQQT

SEQ ID NO: 558 - protein, 14 aa, synthetic construct
GSGQNQQTSMSNAT

SEQ ID NO: 559 - protein, 14 aa, synthetic construct
GSGQDMKQHHNQQT

SEQ ID NO: 560 - protein, 14 aa, synthetic construct
GLRLSTPSGQNQQT

SEQ ID NO: 561 - protein, 14 aa, synthetic construct
GSGQNQQTSVYMNT

SEQ ID NO: 562 - protein, 14 aa, synthetic construct
GSGQNQYSQSSMQT

SEQ ID NO: 563 - protein, 14 aa, synthetic construct
GSGQNQQSMADHTT

SEQ ID NO: 564 - protein, 14 aa, synthetic construct
GWERSFVSGQNQQT

SEQ ID NO: 565 - protein, 14 aa, synthetic construct
GLLAGKSSGQNQQT

SEQ ID NO: 566 - protein, 14 aa, synthetic construct
GKSFVPQSGQNQQT

SEQ ID NO: 567 - protein, 14 aa, synthetic construct
GSGQMQSAGSNQQT

SEQ ID NO: 568 - protein, 14 aa, synthetic construct
GSDQNQRLTSSMQT

SEQ ID NO: 569 - protein, 14 aa, synthetic construct
GESRAVLSGQNQQT

SEQ ID NO: 570 - protein, 14 aa, synthetic construct
GSVFGVPSGQNQQT

SEQ ID NO: 571 - protein, 14 aa, synthetic construct
GSGLPDRNLQNQQT

SEQ ID NO: 572 - protein, 14 aa, synthetic construct
GSGTHNSAIQNQQT

SEQ ID NO: 573 - protein, 14 aa, synthetic construct
GSGMIIASMQNQQT

SEQ ID NO: 574 - protein, 14 aa, synthetic construct
GGITWTDSGQNQQT

SEQ ID NO: 575 - protein, 14 aa, synthetic construct
GSGQNQQASGRQQT

SEQ ID NO: 576 - protein, 14 aa, synthetic construct
GSGQNQQPHLKSLT

SEQ ID NO: 577 - protein, 14 aa, synthetic construct
GPPQHMTSGQNQQT

SEQ ID NO: 578 - protein, 14 aa, synthetic construct
GSGQNQQASLPSRT

SEQ ID NO: 579 - protein, 14 aa, synthetic construct
GSGQIVSTQTNQQT

SEQ ID NO: 580 - protein, 14 aa, synthetic construct
GSGKGHSAGQNQQT

SEQ ID NO: 581 - protein, 14 aa, synthetic construct
GSGQNTRLQLGQQT

SEQ ID NO: 582 - protein, 14 aa, synthetic construct
GSVGSRPVGQNQQT

SEQ ID NO: 583 - protein, 14 aa, synthetic construct
GSSHTLALGQNQQT

SEQ ID NO: 584 - protein, 14 aa, synthetic construct
GMYEYSQSGQNQQT

SEQ ID NO: 585 - protein, 14 aa, synthetic construct
GNGQNQQHSILHGT

SEQ ID NO: 586 - protein, 14 aa, synthetic construct
GSGYNQPHLQNQQT

SEQ ID NO: 587 - protein, 14 aa, synthetic construct
GPLVNASSGQNQQT

SEQ ID NO: 588 - protein, 14 aa, synthetic construct
GSGQNQQVLTTART

SEQ ID NO: 589 - protein, 14 aa, synthetic construct
GSGQNQHSVHNDQT

SEQ ID NO: 590 - protein, 14 aa, synthetic construct
GAGLIMHSGQNQQT

SEQ ID NO: 591 - protein, 14 aa, synthetic construct
GMGRHSASGQNQQT

SEQ ID NO: 592 - protein, 14 aa, synthetic construct
GSHSQSGHGQNQQT

SEQ ID NO: 593 - protein, 14 aa, synthetic construct
GSSTTIVSGQNHQT

SEQ ID NO: 594 - protein, 14 aa, synthetic construct
GRHLVTASGQNQQT

SEQ ID NO: 595 - protein, 14 aa, synthetic construct
GSGQNQQHANLNQT

SEQ ID NO: 596 - protein, 14 aa, synthetic construct
GSGSTHSKAQNQQT

SEQ ID NO: 597 - protein, 14 aa, synthetic construct
GSGQNKQMLSGNTT

SEQ ID NO: 598 - protein, 14 aa, synthetic construct
GSGQVHNPTQNQQT

SEQ ID NO: 599 - protein, 14 aa, synthetic construct
GSGQNQQIPHVHQT

SEQ ID NO: 600 - protein, 14 aa, synthetic construct
GSLHAGLSGQNQQT

SEQ ID NO: 601 - protein, 14 aa, synthetic construct
GPAQHGTSGQNQQT

SEQ ID NO: 602 - protein, 14 aa, synthetic construct
GEKAVTSSGQNQQT

SEQ ID NO: 603 - protein, 14 aa, synthetic construct
GSGQNQQTMANGQR

SEQ ID NO: 604 - protein, 14 aa, synthetic construct
GSGSPHSKDQNQQT

SEQ ID NO: 605 - protein, 14 aa, synthetic construct
GSFSMGYGGQNQQT

SEQ ID NO: 606 - protein, 14 aa, synthetic construct
GSGTHLVSLQNQQT

SEQ ID NO: 607 - protein, 14 aa, synthetic construct
GSGQMQPHVQNQQT

SEQ ID NO: 608 - protein, 14 aa, synthetic construct
GSGQNQQVAGLNNT

SEQ ID NO: 609 - protein, 14 aa, synthetic construct
GSSQNQQHDMRLRT

SEQ ID NO: 610 - protein, 14 aa, synthetic construct
GPASLPISGQNQQT

SEQ ID NO: 611 - protein, 14 aa, synthetic construct
GSGQNQQPPLATRT

SEQ ID NO: 612 - protein, 14 aa, synthetic construct
GSSRVPVSGQNQQT

SEQ ID NO: 613 - protein, 14 aa, synthetic construct
GSGQNQQTNLGHTT

SEQ ID NO: 614 - protein, 14 aa, synthetic construct
GSGQNQQLVSRVQT

SEQ ID NO: 615 - protein, 14 aa, synthetic construct
GPNSYPVSGQKQQT

SEQ ID NO: 616 - protein, 14 aa, synthetic construct
GHAHYQASGQNQQT

SEQ ID NO: 617 - protein, 14 aa, synthetic construct
GSGQALLSTGNQQT

SEQ ID NO: 618 - protein, 14 aa, synthetic construct
GSGQLPRQMTNQQT

SEQ ID NO: 619 - protein, 14 aa, synthetic construct
GSGFPKSTEQNQQT

SEQ ID NO: 620 - protein, 14 aa, synthetic construct
GSRETSLSGQNQQT

SEQ ID NO: 621 - protein, 14 aa, synthetic construct
GSGQNQQGTGVSHT

SEQ ID NO: 622 - protein, 14 aa, synthetic construct
GSRTVPVYGQNQQT

SEQ ID NO: 623 - protein, 14 aa, synthetic construct
GSNAQSAHGQNQQT

SEQ ID NO: 624 - protein, 14 aa, synthetic construct
GAFHLAASGQNQQT

SEQ ID NO: 625 - protein, 14 aa, synthetic construct
GSGQYRSSSDNQQT

SEQ ID NO: 626 - protein, 14 aa, synthetic construct
GSGQVYISTPNQQT

SEQ ID NO: 627 - protein, 14 aa, synthetic construct
GSGVSTQLLQNQQT

SEQ ID NO: 628 - protein, 14 aa, synthetic construct
GSGQLGLSVTNQQT

SEQ ID NO: 629 - protein, 14 aa, synthetic construct
GSGSNMRLSQNQQT

SEQ ID NO: 630 - protein, 14 aa, synthetic construct
GSGQNLHSGLPQQT

SEQ ID NO: 631 - protein, 14 aa, synthetic construct
GSSHTLALGQNKQT

SEQ ID NO: 632 - protein, 14 aa, synthetic construct
GSGQNQHSLPAHRT

SEQ ID NO: 633 - protein, 14 aa, synthetic construct
GSGQNQGTVYPNQT

SEQ ID NO: 634 - protein, 14 aa, synthetic construct
GSGQNQQPSLRQST

SEQ ID NO: 635 - protein, 14 aa, synthetic construct
GSGQNARLKDNQQT

SEQ ID NO: 636 - protein, 14 aa, synthetic construct
GHAGSTGSGQNQQT

SEQ ID NO: 637 - protein, 14 aa, synthetic construct
GSGQALSSSGNQQT

SEQ ID NO: 638 - protein, 14 aa, synthetic construct
GSGASESHRQNQQT

SEQ ID NO: 639 - protein, 14 aa, synthetic construct
GVGVITSSGQNQQT

SEQ ID NO: 640 - protein, 14 aa, synthetic construct
GSLYGQSLGQNQQT

SEQ ID NO: 641 - protein, 14 aa, synthetic construct
GSGQMSDVHGNQQT

SEQ ID NO: 642 - protein, 14 aa, synthetic construct
GSGQNQQHSSKATT

SEQ ID NO: 643 - protein, 14 aa, synthetic construct
GSGQNQQTSVSQQT

SEQ ID NO: 644 - protein, 14 aa, synthetic construct
GSGQKMWKLDNQQT

SEQ ID NO: 645 - protein, 14 aa, synthetic construct
GSGQNVSMQVNQQT

SEQ ID NO: 646 - protein, 14 aa, synthetic construct
GSGQNQRATLSNQT

SEQ ID NO: 647 - protein, 14 aa, synthetic construct
GSGQASSKSANQQT

SEQ ID NO: 648 - protein, 14 aa, synthetic construct
GSGKNQTPIPKGQT

SEQ ID NO: 649 - protein, 14 aa, synthetic construct
GSGQNQQTRQEGST

SEQ ID NO: 650 - protein, 14 aa, synthetic construct
GASSLATSGQNQQT

SEQ ID NO: 651 - protein, 14 aa, synthetic construct
GSGQRGSLTENQQT

SEQ ID NO: 652 - protein, 14 aa, synthetic construct
GSEQTRQRGQNQQT

SEQ ID NO: 653 - protein, 14 aa, synthetic construct
GSGQNQQTLTASKE

SEQ ID NO: 654 - protein, 14 aa, synthetic construct
GSGTSGKTGKNQQT

SEQ ID NO: 655 - protein, 14 aa, synthetic construct
GQLVTFTSGQNQQT

SEQ ID NO: 656 - protein, 14 aa, synthetic construct
GSGQNQQSANKILT

SEQ ID NO: 657 - protein, 14 aa, synthetic construct
GSGQNQQHHSSHTT

SEQ ID NO: 658 - protein, 14 aa, synthetic construct
GSGQNQKGMQPNQT

SEQ ID NO: 659 - protein, 14 aa, synthetic construct
GSGQLVSGLYNQQT

SEQ ID NO: 660 - protein, 14 aa, synthetic construct
GSSVGVPSGQNQQT

SEQ ID NO: 661 - protein, 14 aa, synthetic construct
GSGQNQQWDSRRQT

SEQ ID NO: 662 - protein, 14 aa, synthetic construct
GSEQTRQSGQNQQT

SEQ ID NO: 663 - protein, 14 aa, synthetic construct
GSGIGSHIPQNQQT

SEQ ID NO: 664 - protein, 14 aa, synthetic construct
GSGQNQRLHGVDQT

SEQ ID NO: 665 - protein, 14 aa, synthetic construct
GEVSRVLSGQNQQT

SEQ ID NO: 666 - protein, 14 aa, synthetic construct
GSGQNQQKVSPLLT

SEQ ID NO: 667 - protein, 14 aa, synthetic construct
GSGLALERSQNQQT

SEQ ID NO: 668 - protein, 14 aa, synthetic construct
GPDRIGSSGQNQQT

SEQ ID NO: 669 - protein, 14 aa, synthetic construct
GSGQNQDHQNKQQT

SEQ ID NO: 670 - protein, 14 aa, synthetic construct
GSGQNQQTALYNNT

SEQ ID NO: 671 - protein, 14 aa, synthetic construct
GSGAVHLTAQNQQT

SEQ ID NO: 672 - protein, 14 aa, synthetic construct
GSLVSTQSGQNQQT

SEQ ID NO: 673 - protein, 14 aa, synthetic construct
GSGVSARMVQNQQT

SEQ ID NO: 674 - protein, 14 aa, synthetic construct
GSGQTRMPLANQQT

SEQ ID NO: 675 - protein, 14 aa, synthetic construct
GSGISSRNMQNQQT

SEQ ID NO: 676 - protein, 14 aa, synthetic construct
GSGEKVHSGQNQQT

SEQ ID NO: 677 - protein, 14 aa, synthetic construct
GSGQNQQKLSSMST

SEQ ID NO: 678 - protein, 14 aa, synthetic construct
GSGQNQQTGQHMRV

SEQ ID NO: 679 - protein, 14 aa, synthetic construct
GSGMIHTTAQNQQT

SEQ ID NO: 680 - protein, 14 aa, synthetic construct
GSGQNWPALKGQQT

SEQ ID NO: 681 - protein, 14 aa, synthetic construct
GASHMSISGQNQQT

SEQ ID NO: 682 - protein, 14 aa, synthetic construct
GSDQNQQLGYSKQT

SEQ ID NO: 683 - protein, 14 aa, synthetic construct
GIPSIRESGQNQQT

SEQ ID NO: 684 - protein, 14 aa, synthetic construct
GSGIPSVKFQNQQT

SEQ ID NO: 685 - protein, 14 aa, synthetic construct
GSGQNQQTSVSQNV

SEQ ID NO: 686 - protein, 14 aa, synthetic construct
GSGQNQQIGESRMT

SEQ ID NO: 687 - protein, 14 aa, synthetic construct
GSGSSSMSFQNQQT

SEQ ID NO: 688 - protein, 14 aa, synthetic construct
GSGQKQERAVSKQT

SEQ ID NO: 689 - protein, 14 aa, synthetic construct
GCTTRLNSGQNQQT

SEQ ID NO: 690 - protein, 14 aa, synthetic construct
GSGQNQQIISTKIT

SEQ ID NO: 691 - protein, 14 aa, synthetic construct
GSGQNQQKSLNGNT

SEQ ID NO: 692 - protein, 14 aa, synthetic construct
GSGIPAPRLQNQQT

SEQ ID NO: 693 - protein, 14 aa, synthetic construct
GSGQIRESMGNQQT

SEQ ID NO: 694 - protein, 14 aa, synthetic construct
GSGQNSGVHFNQQT

SEQ ID NO: 695 - protein, 14 aa, synthetic construct
GSGQNIGHSLPQQT

SEQ ID NO: 696 - protein, 14 aa, synthetic construct
GSGERSISVQNQQT

SEQ ID NO: 697 - protein, 14 aa, synthetic construct
GSGLKPNVLQNQQT

SEQ ID NO: 698 - protein, 14 aa, synthetic construct
GSGQVAYAQGNQQT

SEQ ID NO: 699 - protein, 14 aa, synthetic construct
GSGQSSYGSGNQQT

SEQ ID NO: 700 - protein, 14 aa, synthetic construct
GSGQNQAMTHGDQT

SEQ ID NO: 701 - protein, 14 aa, synthetic construct
GSGQNQALVSMGQT

SEQ ID NO: 702 - protein, 14 aa, synthetic construct
GSGQNPSFMRGQQT

SEQ ID NO: 703 - protein, 14 aa, synthetic construct
GSGQNQQSHLRTNT

SEQ ID NO: 704 - protein, 14 aa, synthetic construct
GYTRLETSGQNQQT

SEQ ID NO: 705 - protein, 14 aa, synthetic construct
GSGQSYDMRGNQQT

SEQ ID NO: 706 - protein, 14 aa, synthetic construct
GSRTTQDIGQNQQT

SEQ ID NO: 707 - protein, 14 aa, synthetic construct
GSGHPYKAAQNQQT

SEQ ID NO: 708 - protein, 14 aa, synthetic construct
GRLSNAHGGQNQQT

SEQ ID NO: 709 - protein, 14 aa, synthetic construct
GSGQNQRAVLNDQT

SEQ ID NO: 710 - protein, 14 aa, synthetic construct
GGSHTYGGGQNQQT

SEQ ID NO: 711 - protein, 14 aa, synthetic construct
GSSVNSMIGQNQQT

SEQ ID NO: 712 - protein, 14 aa, synthetic construct
GNSSMMGSGQNQQT

SEQ ID NO: 713 - protein, 14 aa, synthetic construct
GNRDRPSSGQNQQT

SEQ ID NO: 714 - protein, 14 aa, synthetic construct
GSGNMHASRQNQQT

SEQ ID NO: 715 - protein, 14 aa, synthetic construct
GFIFPKVSGQNQQT

SEQ ID NO: 716 - protein, 14 aa, synthetic construct
GSGQNQQLKNSTST

SEQ ID NO: 717 - protein, 14 aa, synthetic construct
GSGQNQQSQYMPRT

SEQ ID NO: 718 - protein, 14 aa, synthetic construct
GSGQRMADIGNQQT

SEQ ID NO: 719 - protein, 14 aa, synthetic construct
GSGQNQSHYPSQQT

SEQ ID NO: 720 - protein, 14 aa, synthetic construct
GSDGKMHRGQNQQT

SEQ ID NO: 721 - protein, 14 aa, synthetic construct
GSGSVGFIGQNQQT

SEQ ID NO: 722 - protein, 14 aa, synthetic construct
GLHGMTLSGQNQQT

SEQ ID NO: 723 - protein, 14 aa, synthetic construct
GSDQSKRGDSNQQT

SEQ ID NO: 724 - protein, 14 aa, synthetic construct
GSLFLATGGQNQQT

SEQ ID NO: 725 - protein, 14 aa, synthetic construct
GSGQNQQPSAFSKT

SEQ ID NO: 726 - protein, 14 aa, synthetic construct
GSGQLPQSGLNQQT

SEQ ID NO: 727 - protein, 14 aa, synthetic construct
GSGSKQNALQNQQT

SEQ ID NO: 728 - protein, 14 aa, synthetic construct
GSGQRRELSQNQQT

SEQ ID NO: 729 - protein, 14 aa, synthetic construct
GSGQREPKASNQQT

SEQ ID NO: 730 - protein, 14 aa, synthetic construct
GSGQNQQHPSTQQT

SEQ ID NO: 731 - protein, 14 aa, synthetic construct
GSQSTLGLGQNQQT

SEQ ID NO: 732 - protein, 14 aa, synthetic construct
GSGQNQQMPGLSST

SEQ ID NO: 733 - protein, 14 aa, synthetic construct
GSGQNQQTVGGKNL

SEQ ID NO: 734 - protein, 14 aa, synthetic construct
GSSREFHSGQNQQT

SEQ ID NO: 735 - protein, 14 aa, synthetic construct
GSGQNQQTVPSNLV

SEQ ID NO: 736 - protein, 14 aa, synthetic construct
GSGQNAYSSQAQQT

SEQ ID NO: 737 - protein, 14 aa, synthetic construct
GSGQNKDHSTRRQT

SEQ ID NO: 738 - protein, 14 aa, synthetic construct
GQLGSVGSGQDQQT

SEQ ID NO: 739 - protein, 14 aa, synthetic construct
GSGQHAAPGHNQQT

SEQ ID NO: 740 - protein, 14 aa, synthetic construct
GSGQNQQTSQSPPT

SEQ ID NO: 741 - protein, 14 aa, synthetic construct
GSGNYRDHEQNQQT

SEQ ID NO: 742 - protein, 14 aa, synthetic construct
GSGQHSNQHVNQQT

SEQ ID NO: 743 - protein, 14 aa, synthetic construct
GSGQTARNGINQQT

SEQ ID NO: 744 - protein, 14 aa, synthetic construct
GSGQNQQHYGSQGT

SEQ ID NO: 745 - protein, 14 aa, synthetic construct
GSGSPQASRQNQQT

SEQ ID NO: 746 - protein, 14 aa, synthetic construct
GSGFSHSMGKNQQT

SEQ ID NO: 747 - protein, 14 aa, synthetic construct
GSGQSHSLETNQQT

SEQ ID NO: 748 - protein, 14 aa, synthetic construct
GTEQTRQSGQNQQT

SEQ ID NO: 749 - protein, 14 aa, synthetic construct
GSGRHLASVQNQQT

SEQ ID NO: 750 - protein, 14 aa, synthetic construct
GLGSKNHSGQNQQT

SEQ ID NO: 751 - protein, 14 aa, synthetic construct
GSGQNQQTSHFPSA

SEQ ID NO: 752 - protein, 14 aa, synthetic construct
GSGQLSGTPQNQQT

SEQ ID NO: 753 - protein, 14 aa, synthetic construct
GSGQNQQAPHKKET

SEQ ID NO: 754 - protein, 14 aa, synthetic construct
GSGQNQQTLRGSLE

SEQ ID NO: 755 - protein, 14 aa, synthetic construct
GSIAMTSHGQNQQT

SEQ ID NO: 756 - protein, 14 aa, synthetic construct
GSPGVSPSGQNQQT

SEQ ID NO: 757 - protein, 14 aa, synthetic construct
GSGQNQQTGSSSRV

SEQ ID NO: 758 - protein, 14 aa, synthetic construct
GSGQHLPLLGNQQT

SEQ ID NO: 759 - protein, 14 aa, synthetic construct
GSDHSHRGGQNQQT

SEQ ID NO: 760 - protein, 14 aa, synthetic construct
GSGIVTKLGQNQQT

SEQ ID NO: 761 - protein, 14 aa, synthetic construct
GSGQDVTKTGNQQT

SEQ ID NO: 762 - protein, 14 aa, synthetic construct
GSGQNQQSHGRIGT

SEQ ID NO: 763 - protein, 14 aa, synthetic construct
GSGQNQQINHRSPT

SEQ ID NO: 764 - protein, 14 aa, synthetic construct
GSGDDSRVGQNQQT

SEQ ID NO: 765 - protein, 14 aa, synthetic construct
GSGQSTLKRINQQT

SEQ ID NO: 766 - protein, 14 aa, synthetic construct
GSGSQHSKAQNQQT

SEQ ID NO: 767 - protein, 14 aa, synthetic construct
GSGQNQQHASSNNT

SEQ ID NO: 768 - protein, 14 aa, synthetic construct
GSRTYQVSGQNQQT

SEQ ID NO: 769 - protein, 14 aa, synthetic construct
GSGQNQGLLSSPQT

SEQ ID NO: 770 - protein, 14 aa, synthetic construct
GSGGGLQHNQNQQT

SEQ ID NO: 771 - protein, 14 aa, synthetic construct
GSGQNQQTTAATRM

SEQ ID NO: 772 - protein, 14 aa, synthetic construct
GSGQNQRASILVQT

SEQ ID NO: 773 - protein, 14 aa, synthetic construct
GSGQNLGLLGAQQT

SEQ ID NO: 774 - protein, 14 aa, synthetic construct
GSLDLGRSGQNQQT

SEQ ID NO: 775 - protein, 14 aa, synthetic construct
GNSQVKVSGQNQQT

SEQ ID NO: 776 - protein, 14 aa, synthetic construct
GSSGSHQYGQNQQT

SEQ ID NO: 777 - protein, 14 aa, synthetic construct
GSGQNQQQRDGTLT

SEQ ID NO: 778 - protein, 14 aa, synthetic construct
GRGQHVSVANNQQT

SEQ ID NO: 779 - protein, 14 aa, synthetic construct
GDSSSRISGQNQQT

SEQ ID NO: 780 - protein, 14 aa, synthetic construct
GSGQNQQHSLSSQT

SEQ ID NO: 781 - protein, 14 aa, synthetic construct
GSLMDVHRGQNQQT

SEQ ID NO: 782 - protein, 14 aa, synthetic construct
GSIQYQSSGQNQQT

SEQ ID NO: 783 - protein, 14 aa, synthetic construct
GLGSKNPSGQNQQT

SEQ ID NO: 784 - protein, 14 aa, synthetic construct
GSGQLVLTLQNQQT

SEQ ID NO: 785 - protein, 14 aa, synthetic construct
GSGQNQQTSQPLPG

SEQ ID NO: 786 - protein, 14 aa, synthetic construct
GSGQNQQNLGKLNT

SEQ ID NO: 787 - protein, 14 aa, synthetic construct
GTTAHQPSGQNQQT

SEQ ID NO: 788 - protein, 14 aa, synthetic construct
GSGQNRAQIGTQQT

SEQ ID NO: 789 - protein, 14 aa, synthetic construct
GSGQYVHVSSNQQT

SEQ ID NO: 790 - protein, 14 aa, synthetic construct
GSGQNQQTAHAFNI

SEQ ID NO: 791 - protein, 14 aa, synthetic construct
GSGQNQRTMVATQT

SEQ ID NO: 792 - protein, 14 aa, synthetic construct
GSGQNPIRGAMQQT

SEQ ID NO: 793 - protein, 14 aa, synthetic construct
GSGYVITGSQNQQT

SEQ ID NO: 794 - protein, 14 aa, synthetic construct
GRGPKQSNIQNQQT

SEQ ID NO: 795 - protein, 14 aa, synthetic construct
GSGQNQQTMLGKPC

SEQ ID NO: 796 - protein, 14 aa, synthetic construct
GSGQNQQVGSTVRT

SEQ ID NO: 797 - protein, 14 aa, synthetic construct
GNVTTQKSGQNQQT

SEQ ID NO: 798 - protein, 14 aa, synthetic construct
GSGNPVSHLQNQQT

SEQ ID NO: 799 - protein, 14 aa, synthetic construct
GSLSHMESGQNQQT

SEQ ID NO: 800 - protein, 14 aa, synthetic construct
GRAPTNLSGQNQQT

SEQ ID NO: 801 - protein, 14 aa, synthetic construct
GSGQNQQTVMTARA

SEQ ID NO: 802 - protein, 14 aa, synthetic construct
GSGMPASRLQNQQT

SEQ ID NO: 803 - protein, 14 aa, synthetic construct
GVVRNHQSGQNQQT

SEQ ID NO: 804 - protein, 14 aa, synthetic construct
GSGQNQHSVQVRQT

SEQ ID NO: 805 - protein, 14 aa, synthetic construct
GSGQNTGHLTMQQT

SEQ ID NO: 806 - protein, 14 aa, synthetic construct
GSGQNQQYAGKILT

SEQ ID NO: 807 - protein, 14 aa, synthetic construct
GSGNPHVRNQNQQT

SEQ ID NO: 808 - protein, 14 aa, synthetic construct
GSGQNGGSSNRQQT

SEQ ID NO: 809 - protein, 14 aa, synthetic construct
GSGQRLSQGVNHQT

SEQ ID NO: 810 - protein, 14 aa, synthetic construct
GSGQNAHAKEGQQT

SEQ ID NO: 811 - protein, 14 aa, synthetic construct
GSSPAPNSGQNQQT

SEQ ID NO: 812 - protein, 14 aa, synthetic construct
GLAHKTSSGQNQQT

SEQ ID NO: 813 - protein, 14 aa, synthetic construct
GSGQNQQTPGAHKT

SEQ ID NO: 814 - protein, 14 aa, synthetic construct
GSGQNQQSLSGSFT

SEQ ID NO: 815 - protein, 14 aa, synthetic construct
GSGQNQQSTGTSRT

SEQ ID NO: 816 - protein, 14 aa, synthetic construct
GSGQNQQTVQSNLV

SEQ ID NO: 817 - protein, 14 aa, synthetic construct
GSGQNQQLGSRQCT

SEQ ID NO: 818 - protein, 14 aa, synthetic construct
GSGQNQYLRLELQT

SEQ ID NO: 819 - protein, 14 aa, synthetic construct
GSGQNQQTSPRLQT

SEQ ID NO: 820 - protein, 14 aa, synthetic construct
GSGQNQQTTSSNMT

SEQ ID NO: 821 - protein, 14 aa, synthetic construct
GTASTYNSGQNQQT

SEQ ID NO: 822 - protein, 14 aa, synthetic construct
GSGQNQQTMPQHKI

SEQ ID NO: 823 - protein, 14 aa, synthetic construct
GSGQSHLHTGNQQT

SEQ ID NO: 824 - protein, 14 aa, synthetic construct
GVKGVGHSGQNQQT

SEQ ID NO: 825 - protein, 14 aa, synthetic construct
GSGKVTKQSQNQQT

SEQ ID NO: 826 - protein, 14 aa, synthetic construct
GSGQNQQTALEKSL

SEQ ID NO: 827 - protein, 14 aa, synthetic construct
GSGYKDTYGQNQQT

SEQ ID NO: 828 - protein, 14 aa, synthetic construct
GSGQNQQSGTFLST

SEQ ID NO: 829 - protein, 14 aa, synthetic construct
GSGQNTGQHMMQQT

SEQ ID NO: 830 - protein, 14 aa, synthetic construct
GSGKNQQRPGLDQT

SEQ ID NO: 831 - protein, 14 aa, synthetic construct
GSGQSREISLNQQT

SEQ ID NO: 832 - protein, 14 aa, synthetic construct
GTPTSPSSGQNQQT

SEQ ID NO: 833 - protein, 14 aa, synthetic construct
GKPAGGLSGQNQQT

SEQ ID NO: 834 - protein, 14 aa, synthetic construct
GSGQNHRSADMQQT

SEQ ID NO: 835 - protein, 14 aa, synthetic construct
GSGQNQQTLPSLSL

SEQ ID NO: 836 - protein, 14 aa, synthetic construct
GSPYMGATGQNQQT

SEQ ID NO: 837 - protein, 14 aa, synthetic construct
GSGHAKAVGQNQQT

SEQ ID NO: 838 - protein, 14 aa, synthetic construct
GHMKGVTSGQNQQT

SEQ ID NO: 839 - protein, 14 aa, synthetic construct
GSGQNQKILTLDQT

SEQ ID NO: 840 - protein, 14 aa, synthetic construct
GSGQNQQTKVGHSA

SEQ ID NO: 841 - protein, 14 aa, synthetic construct
GIARTTISGQNQQT

SEQ ID NO: 842 - protein, 14 aa, synthetic construct
GSGQNQQTSVGFRT

SEQ ID NO: 843 - protein, 14 aa, synthetic construct
GSGQNQQTMIANIR

SEQ ID NO: 844 - protein, 14 aa, synthetic construct
GDMTRSSSGQNQQT

SEQ ID NO: 845 - protein, 14 aa, synthetic construct
GSGHMSDLRQNQQT

SEQ ID NO: 846 - protein, 14 aa, synthetic construct
GRGAVMASGQNQQT

SEQ ID NO: 847 - protein, 14 aa, synthetic construct
GSGQNQQLSGKSVT

SEQ ID NO: 848 - protein, 14 aa, synthetic construct
GSHTLVVSGQNQQT

SEQ ID NO: 849 - protein, 14 aa, synthetic construct
GSGPWSAGLQNQQT

SEQ ID NO: 850 - protein, 14 aa, synthetic construct
GSGQHSPHALNQQT

SEQ ID NO: 851 - protein, 14 aa, synthetic construct
GSGQNQQPNSGSMT

SEQ ID NO: 852 - protein, 14 aa, synthetic construct
GSGLAHLGGQNQQT

SEQ ID NO: 853 - protein, 14 aa, synthetic construct
GSSVRYEPKQNQQT

SEQ ID NO: 854 - protein, 14 aa, synthetic construct
GSGQNQQARPLELT

SEQ ID NO: 855 - protein, 14 aa, synthetic construct
GSGQPRSTGINQQT

SEQ ID NO: 856 - protein, 14 aa, synthetic construct
GSGQNQANWVKVQT

SEQ ID NO: 857 - protein, 14 aa, synthetic construct
GSGHLFQSGQNQQT

SEQ ID NO: 858 - protein, 14 aa, synthetic construct
GSGQNRGISISQQT

SEQ ID NO: 859 - protein, 14 aa, synthetic construct
GSGTHYDNRQNQQT

SEQ ID NO: 860 - protein, 14 aa, synthetic construct
GSGQNQQTSTTPLP

SEQ ID NO: 861 - protein, 14 aa, synthetic construct
GSGQVHASQVNQKT

SEQ ID NO: 862 - protein, 14 aa, synthetic construct
GSSGHRESGQNQQT

SEQ ID NO: 863 - protein, 14 aa, synthetic construct
GLSAEKSSGQNQQT

SEQ ID NO: 864 - protein, 14 aa, synthetic construct
GSGQEHRSLANQQT

SEQ ID NO: 865 - protein, 14 aa, synthetic construct
GSGQTVVRIANQQT

SEQ ID NO: 866 - protein, 14 aa, synthetic construct
GSGQNVSSVHRQQT

SEQ ID NO: 867 - protein, 14 aa, synthetic construct
GSGASRMSIQNQQT

SEQ ID NO: 868 - protein, 14 aa, synthetic construct
GVAFIGSSGQNQQT

SEQ ID NO: 869 - protein, 14 aa, synthetic construct
GSGQNQQTVPTRQT

SEQ ID NO: 870 - protein, 14 aa, synthetic construct
GSGQAAKSSQNQQT

SEQ ID NO: 871 - protein, 14 aa, synthetic construct
GSGQNQQVAIRTST

SEQ ID NO: 872 - protein, 14 aa, synthetic construct
GSVHMQNAGQNQQT

SEQ ID NO: 873 - protein, 14 aa, synthetic construct
GSGMRQAGVQNQQT

SEQ ID NO: 874 - protein, 14 aa, synthetic construct
GSGQNQQVGGKTVT

SEQ ID NO: 875 - protein, 14 aa, synthetic construct
GVHDMRVSGQNQQT

SEQ ID NO: 876 - protein, 14 aa, synthetic construct
GSGQHVSVANNQQT

SEQ ID NO: 877 - protein, 14 aa, synthetic construct
GSAAMSVRGQNQQT

SEQ ID NO: 878 - protein, 14 aa, synthetic construct
GVSRGGPSGQNQQT

SEQ ID NO: 879 - protein, 14 aa, synthetic construct
GSGQMVHTIGNQQT

SEQ ID NO: 880 - protein, 14 aa, synthetic construct
GRGGSMAETQNQQT

SEQ ID NO: 881 - protein, 14 aa, synthetic construct
GSGHTNPTRQNQQT

SEQ ID NO: 882 - protein, 14 aa, synthetic construct
GSGEAARYEQNQQT

SEQ ID NO: 883 - protein, 14 aa, synthetic construct
GSGQNERHLVLQQT

SEQ ID NO: 884 - protein, 14 aa, synthetic construct
GSGQNQQSKQQVLT

SEQ ID NO: 885 - protein, 14 aa, synthetic construct
GSGQARAHRGNQQT

SEQ ID NO: 886 - protein, 14 aa, synthetic construct
GSGQNQQPLDTSRT

SEQ ID NO: 887 - protein, 14 aa, synthetic construct
GSGQNQQLANMVTT

SEQ ID NO: 888 - protein, 14 aa, synthetic construct
GSGQMKDLHRNQQT

SEQ ID NO: 889 - protein, 14 aa, synthetic construct
GSGQNQHLSSFVQT

SEQ ID NO: 890 - protein, 14 aa, synthetic construct
GSGQNQQPSSRVTT

SEQ ID NO: 891 - protein, 14 aa, synthetic construct
GSGQNQQLAITLGT

SEQ ID NO: 892 - protein, 14 aa, synthetic construct
GSGQNQQTVGNPAT

SEQ ID NO: 893 - protein, 14 aa, synthetic construct
GSGQNQGRAHPMQT

SEQ ID NO: 894 - protein, 14 aa, synthetic construct
GSGQLIASVVNQQT

SEQ ID NO: 895 - protein, 14 aa, synthetic construct
GSSVRSLVGQNQQT

SEQ ID NO: 896 - protein, 14 aa, synthetic construct
GGAGSAHSGQNQQT

SEQ ID NO: 897 - protein, 14 aa, synthetic construct
GSDQNQQTMSSTRT

SEQ ID NO: 898 - protein, 14 aa, synthetic construct
GSGQNQQMAGAFRT

SEQ ID NO: 899 - protein, 14 aa, synthetic construct
GSLGNLQRGQNQQT

SEQ ID NO: 900 - protein, 14 aa, synthetic construct
GSGPSISHGQNQQT

SEQ ID NO: 901 - protein, 14 aa, synthetic construct
GSGQNQQSSFNVQT

SEQ ID NO: 902 - protein, 14 aa, synthetic construct
GSGQNQQTGQATHN

SEQ ID NO: 903 - protein, 14 aa, synthetic construct
VSGSPHSKAQNQQT

SEQ ID NO: 904 - protein, 14 aa, synthetic construct
CSGSPHSKAQNQQT

SEQ ID NO: 905 - protein, 14 aa, synthetic construct
GSGSPHRKAQNQQT

SEQ ID NO: 906 - protein, 14 aa, synthetic construct
GRGSPHSKAQNQQT

SEQ ID NO: 907 - protein, 14 aa, synthetic construct
GSGSPHSKAQNKQT

SEQ ID NO: 908 - protein, 14 aa, synthetic construct
GSGSPHSKAQTQQT

SEQ ID NO: 909 - protein, 14 aa, synthetic construct
GSGSTHASRQNQQT

SEQ ID NO: 910 - protein, 14 aa, synthetic construct
GSGSPHKYGQNQQT

SEQ ID NO: 911 - protein, 14 aa, synthetic construct
GSGSPHKFGQNQQT

SEQ ID NO: 912 - protein, 14 aa, synthetic construct
VSGSPHKFGQNQQT

SEQ ID NO: 913 - protein, 14 aa, synthetic construct
GSGSPHSKAQNHQT

SEQ ID NO: 914 - protein, 14 aa, synthetic construct
GSGSPHSKAQHQQT

SEQ ID NO: 915 - protein, 14 aa, synthetic construct
GSGSPHKTYQNQQT

SEQ ID NO: 916 - protein, 14 aa, synthetic construct
VSGSPHASRQNQQT

SEQ ID NO: 917 - protein, 14 aa, synthetic construct
GSGSPHKFGKNQQT

SEQ ID NO: 918 - protein, 14 aa, synthetic construct
GSGSPHASRQNQHT

SEQ ID NO: 919 - protein, 14 aa, synthetic construct
GSHSPHKSGQNQQT

SEQ ID NO: 920 - protein, 14 aa, synthetic construct
GSGQNQQRRMSPST

SEQ ID NO: 921 - protein, 14 aa, synthetic construct
GSGSPHSKPQNQQT

SEQ ID NO: 922 - protein, 14 aa, synthetic construct
GSGSPHKFGQKQQT

SEQ ID NO: 923 - protein, 14 aa, synthetic construct
VSGSPHGARQNQQT

SEQ ID NO: 924 - protein, 14 aa, synthetic construct
GSGSPHSKAQKQQT

SEQ ID NO: 925 - protein, 14 aa, synthetic construct
GSHSPHKRGQNQQT

SEQ ID NO: 926 - protein, 14 aa, synthetic construct
GSGQNRQRLKGLET

SEQ ID NO: 927 - protein, 14 aa, synthetic construct
GSGSPHKLGQNQQT

SEQ ID NO: 928 - protein, 14 aa, synthetic construct
GSGSPHKTSKNQQT

SEQ ID NO: 929 - protein, 14 aa, synthetic construct
GSGSPHKIGQNQQT

SEQ ID NO: 930 - protein, 14 aa, synthetic construct
GSGQDSPHVRNQQT

SEQ ID NO: 931 - protein, 14 aa, synthetic construct
GSGSPHKTSQNQQT

SEQ ID NO: 932 - protein, 14 aa, synthetic construct
GSGSPHASRKNQQT

SEQ ID NO: 933 - protein, 14 aa, synthetic construct
GSHSPHKSGQKQQT

SEQ ID NO: 934 - protein, 14 aa, synthetic construct
GSGSPHKTSQKQQT

SEQ ID NO: 935 - protein, 14 aa, synthetic construct
GSGSPHVRGQNKQT

SEQ ID NO: 936 - protein, 14 aa, synthetic construct
GSGSPHKTTQNQQT

SEQ ID NO: 937 - protein, 14 aa, synthetic construct
GSGPVRALRQNQQT

SEQ ID NO: 938 - protein, 14 aa, synthetic construct
GSGSPHVRGQKQQT

SEQ ID NO: 939 - protein, 14 aa, synthetic construct
CSGSPHKTSQNQQT

SEQ ID NO: 940 - protein, 14 aa, synthetic construct
CSHSPHKSGQNQQT

SEQ ID NO: 941 - protein, 6 aa, synthetic construct
SPHSKA

SEQ ID NO: 942 - DNA, 18 bp, synthetic construct
  source 1..18: mol_type = other DNA
agcccacacagcaaagca

SEQ ID NO: 943 - protein, 8 aa, synthetic construct
HDSPHKSG

SEQ ID NO: 944 - DNA, 24 bp, synthetic construct
  source 1..24: mol_type = other DNA
cacgacagcccacacaaaagcgga

SEQ ID NO: 945 - protein, 6 aa, synthetic construct
SPHSKA

SEQ ID NO: 946 - protein, 6 aa, synthetic construct
SPHKSG

SEQ ID NO: 947 - protein, 6 aa, synthetic construct
SPHARM

SEQ ID NO: 948 - protein, 6 aa, synthetic construct
SPHVKS

SEQ ID NO: 949 - protein, 6 aa, synthetic construct
SPHASR

SEQ ID NO: 950 - protein, 6 aa, synthetic construct
SPHVKI

SEQ ID NO: 951 - protein, 6 aa, synthetic construct
SPHKSR

SEQ ID NO: 952 - protein, 6 aa, synthetic construct
SPHSLR

SEQ ID NO: 953 - protein, 6 aa, synthetic construct
SPHSKW

SEQ ID NO: 954 - protein, 6 aa, synthetic construct
SPHKKN

SEQ ID NO: 955 - protein, 6 aa, synthetic construct
SPHVRM

SEQ ID NO: 956 - protein, 6 aa, synthetic construct
SPHRKA

SEQ ID NO: 957 - protein, 6 aa, synthetic construct
SPHKFG

SEQ ID NO: 958 - protein, 6 aa, synthetic construct
SPHKIG

SEQ ID NO: 959 - protein, 6 aa, synthetic construct
SPHKLG

SEQ ID NO: 960 - protein, 6 aa, synthetic construct
SPHSKL

SEQ ID NO: 961 - protein, 6 aa, synthetic construct
SPHSRG

SEQ ID NO: 962 - protein, 6 aa, synthetic construct
SPHSKS

SEQ ID NO: 963 - protein, 6 aa, synthetic construct
SPHKTS

SEQ ID NO: 964 - protein, 6 aa, synthetic construct
SPHKTT

SEQ ID NO: 965 - protein, 6 aa, synthetic construct
SPHKTY

SEQ ID NO: 966 - protein, 6 aa, synthetic construct
SPHKYG

SEQ ID NO: 967 - protein, 6 aa, synthetic construct
SPHSKD

SEQ ID NO: 968 - protein, 6 aa, synthetic construct
SPHSKP

SEQ ID NO: 969 - protein, 6 aa, synthetic construct
SPHSRA

SEQ ID NO: 970 - protein, 6 aa, synthetic construct
SPHSSR

SEQ ID NO: 971 - protein, 6 aa, synthetic construct
SPHWKA

SEQ ID NO: 972 - protein, 6 aa, synthetic construct
SPHTRG

SEQ ID NO: 973 - protein, 6 aa, synthetic construct
SPHVRG

SEQ ID NO: 974 - protein, 6 aa, synthetic construct
SPHKRG

SEQ ID NO: 975 - protein, 6 aa, synthetic construct
SPHGAR

SEQ ID NO: 976 - protein, 6 aa, synthetic construct
SPHRSG

SEQ ID NO: 977 - protein, 6 aa, synthetic construct
SPHKSA

SEQ ID NO: 978 - protein, 6 aa, synthetic construct
SPHSKR

SEQ ID NO: 979 - protein, 6 aa, synthetic construct
SPHFLR

SEQ ID NO: 980 - protein, 6 aa, synthetic construct
SPHVRR

SEQ ID NO: 981 - protein, 742 aa, synthetic construct
MAADGYLPDWLEDNLSEGIREWWALKPGAPQPKANQQHQDNARGLVLPGYKYLGPGNGLDKGEPVNAADAAALEHDKAYDQQLKAGDNPYLKYNHADAEFQERLKEDTSFGGNLGRAVFQAKKRLLEPLGLVEEAAKTAPGKKRPVEQSPQEPDSSAGIGKSGAQPAKKRLNFGQTGDTESVPDPQPIGEPPAAPSGVGSLTMASGGGAPVADNNEGADGVGSSSGNWHCDSQWLGDRVITTSTRTWALPTYNNHLYKQISNSTSGGSSNDNAYFGYSTPWGYFDFNRFHCHFSPRDWQRLINNNWGFRPKRLNFKLFNIQVKEVTDNNGVKTIANNLTSTVQVFTDSDYQLPYVLGSAHEGCLPPFPADVFMIPQYGYLTLNDGSQAVGRSSFYCLEYFPSQMLRTGNNFQFSYEFENVPFHSSYAHSQSLDRLMNPLIDQYLYYLSKTINGSGSPHSKAQNQQTLKFSVAGPSNMAVQGRNYIPGPSYRQQRVSTTVTQNNNSEFAWPGASSWALNGRNSLMNPGPAMASHKEGEDRFFPLSGSLIFGKQGTGRDNVDADKVMITNEEEIKTTNPVATESYGQVATNHQSAQAQAQTGWVQNQGILPGMVWQDRDVYLQGPIWAKIPHTDGNFHPSPLMGGFGMKHPPPQILIKNTPVPADPPTAFNKDKLNSFITQYSTGQVSVEIEWELQKENSKRWNPEIQYTSNYYKSNNVEFAVNTEGVYSEPRPIGTRYLTRNL

SEQ ID NO: 982 - protein, 742 aa, synthetic construct
MAADGYLPDWLEDNLSEGIREWWALKPGAPQPKANQQHQDNARGLVLPGYKYLGPGNGLDKGEPVNAADAAALEHDKAYDQQLKAGDNPYLKYNHADAEFQERLKEDTSFGGNLGRAVFQAKKRLLEPLGLVEEAAKTAPGKKRPVEQSPQEPDSSAGIGKSGAQPAKKRLNFGQTGDTESVPDPQPIGEPPAAPSGVGSLTMASGGGAPVADNNEGADGVGSSSGNWHCDSQWLGDRVITTSTRTWALPTYNNHLYKQISNSTSGGSSNDNAYFGYSTPWGYFDFNRFHCHFSPRDWQRLINNNWGFRPKRLNFKLFNIQVKEVTDNNGVKTIANNLTSTVQVFTDSDYQLPYVLGSAHEGCLPPFPADVFMIPQYGYLTLNDGSQAVGRSSFYCLEYFPSQMLRTGNNFQFSYEFENVPFHSSYAHSQSLDRLMNPLIDQYLYYLSKTINGHDSPHKSGQNQQTLKFSVAGPSNMAVQGRNYIPGPSYRQQRVSTTVTQNNNSEFAWPGASSWALNGRNSLMNPGPAMASHKEGEDRFFPLSGSLIFGKQGTGRDNVDADKVMITNEEEIKTTNPVATESYGQVATNHQSAQAQAQTGWVQNQGILPGMVWQDRDVYLQGPIWAKIPHTDGNFHPSPLMGGFGMKHPPPQILIKNTPVPADPPTAFNKDKLNSFITQYSTGQVSVEIEWELQKENSKRWNPEIQYTSNYYKSNNVEFAVNTEGVYSEPRPIGTRYLTRNL

SEQ ID NO: 983 - DNA, 2229 bp, synthetic construct
  source 1..2229: mol_type = other DNA
atggctgccgatggttatcttccagattggctcgaggacaaccttagtgaaggaattcgcgagtggtgggctttgaaacctggagcccctcaacccaaggcaaatcaacaacatcaagacaacgctcgaggtcttgtgcttccgggttacaaataccttggacccggcaacggactcgacaagggggagccggtcaacgcagcagacgcggcggccctcgagcacgacaaggcctacgaccagcagctcaaggccggagacaacccgtacctcaagtacaaccacgccgacgccgagttccaggagcggctcaaagaagatacgtcttttgggggcaacctcgggcgagcagtcttccaggccaaaaagaggcttcttgaacctcttggtctggttgaggaagcggctaagacggctcctggaaagaagaggcctgtagagcagtctcctcaggaaccggactcctccgcgggtattggcaaatcgggtgcacagcccgctaaaaagagactcaatttcggtcagactggcgacacagagtcagtcccagaccctcaaccaatcggagaacctcccgcagccccctcaggtgtgggatctcttacaatggcttcaggtggtggcgcaccagtggcagacaataacgaaggtgccgatggagtgggtagttcctcgggaaattggcattgcgattcccaatggctgggggacagagtcatcaccaccagcacccgaacctgggccctgcccacctacaacaatcacctctacaagcaaatctccaacagcacatctggaggatcttcaaatgacaacgcctacttcggctacagcaccccctgggggtattttgacttcaacagattccactgccacttctcaccacgtgactggcagcgactcatcaacaacaactggggattccggcctaagcgactcaacttcaagctcttcaacattcaggtcaaagaggttacggacaacaatggagtcaagaccatcgccaataaccttaccagcacggtccaggtcttcacggactcagactatcagctcccgtacgtgctcgggtcggctcacgagggctgcctcccgccgttcccagcggacgttttcatgattcctcagtacgggtatctgacgcttaatgatggaagccaggccgtgggtcgttcgtccttttactgcctggaatatttcccgtcgcaaatgctaagaacgggtaacaacttccagttcagctacgagtttgagaacgtacctttccatagcagctacgctcacagccaaagcctggaccgactaatgaatccactcatcgaccaatacttgtattacttgagtaaaacaattaacggaagcggaagcccacacagcaaagcacaaaaccaacagaccttgaagttttcggtagctggtcctagcaacatggctgtccagggaagaaactacatacctggacccagctaccgacaacaacgtgtctcaaccactgtgactcaaaacaacaacagcgaatttgcttggcctggagcttcttcttgggctctcaatggacgtaatagcttgatgaatcctggacctgctatggccagccacaaagaaggagaggaccgtttctttcctttgtctggatctttaatttttggcaaacaaggaactggaagagacaacgtggatgcggacaaagtcatgataaccaacgaagaagaaattaaaactactaacccggtagcaacggagtcctatggacaagtggccacaaaccaccagagtgcccaagcacaggcgcagaccggctgggttcaaaaccaaggaatacttccgggtatggtttggcaggacagagatgtgtacctgcaaggacccatttgggccaaaattcctcacacggacggcaactttcacccttctccgctgatgggagggtttggaatgaagcacccgcctcctcagatcctcatcaaaaacacacctgtacctgcggatcctccaacggccttcaacaaggacaagctgaactctttcatcacccagtattctactggccaagtcagcgtggagatcgagtgggagctgcagaaggaaaacagcaagcgctggaacccggagatccagtacacttccaactattacaagtctaataatgttgaatttgctgttaatactgaaggtgtatatagtgaaccccgccccattggcacgcggtatttaacgaggaacttataa

SEQ ID NO: 984 - DNA, 2229 bp, synthetic construct
  source 1..2229: mol_type = other DNA
atggctgccgatggttatcttccagattggctcgaggacaaccttagtgaaggaattcgcgagtggtgggctttgaaacctggagcccctcaacccaaggcaaatcaacaacatcaagacaacgctcgaggtcttgtgcttccgggttacaaataccttggacccggcaacggactcgacaagggggagccggtcaacgcagcagacgcggcggccctcgagcacgacaaggcctacgaccagcagctcaaggccggagacaacccgtacctcaagtacaaccacgccgacgccgagttccaggagcggctcaaagaagatacgtcttttgggggcaacctcgggcgagcagtcttccaggccaaaaagaggcttcttgaacctcttggtctggttgaggaagcggctaagacggctcctggaaagaagaggcctgtagagcagtctcctcaggaaccggactcctccgcgggtattggcaaatcgggtgcacagcccgctaaaaagagactcaatttcggtcagactggcgacacagagtcagtcccagaccctcaaccaatcggagaacctcccgcagccccctcaggtgtgggatctcttacaatggcttcaggtggtggcgcaccagtggcagacaataacgaaggtgccgatggagtgggtagttcctcgggaaattggcattgcgattcccaatggctgggggacagagtcatcaccaccagcacccgaacctgggccctgcccacctacaacaatcacctctacaagcaaatctccaacagcacatctggaggatcttcaaatgacaacgcctacttcggctacagcaccccctgggggtattttgacttcaacagattccactgccacttctcaccacgtgactggcagcgactcatcaacaacaactggggattccggcctaagcgactcaacttcaagctcttcaacattcaggtcaaagaggttacggacaacaatggagtcaagaccatcgccaataaccttaccagcacggtccaggtcttcacggactcagactatcagctcccgtacgtgctcgggtcggctcacgagggctgcctcccgccgttcccagcggacgttttcatgattcctcagtacgggtatctgacgcttaatgatggaagccaggccgtgggtcgttcgtccttttactgcctggaatatttcccgtcgcaaatgctaagaacgggtaacaacttccagttcagctacgagtttgagaacgtacctttccatagcagctacgctcacagccaaagcctggaccgactaatgaatccactcatcgaccaatacttgtattacttgagtaaaacaattaacggacacgacagcccacacaaaagcggacaaaaccaacagaccttgaagttttcggtagctggtcctagcaacatggctgtccagggaagaaactacatacctggacccagctaccgacaacaacgtgtctcaaccactgtgactcaaaacaacaacagcgaatttgcttggcctggagcttcttcttgggctctcaatggacgtaatagcttgatgaatcctggacctgctatggccagccacaaagaaggagaggaccgtttctttcctttgtctggatctttaatttttggcaaacaaggaactggaagagacaacgtggatgcggacaaagtcatgataaccaacgaagaagaaattaaaactactaacccggtagcaacggagtcctatggacaagtggccacaaaccaccagagtgcccaagcacaggcgcagaccggctgggttcaaaaccaaggaatacttccgggtatggtttggcaggacagagatgtgtacctgcaaggacccatttgggccaaaattcctcacacggacggcaactttcacccttctccgctgatgggagggtttggaatgaagcacccgcctcctcagatcctcatcaaaaacacacctgtacctgcggatcctccaacggccttcaacaaggacaagctgaactctttcatcacccagtattctactggccaagtcagcgtggagatcgagtgggagctgcagaaggaaaacagcaagcgctggaacccggagatccagtacacttccaactattacaagtctaataatgttgaatttgctgttaatactgaaggtgtatatagtgaaccccgccccattggcacgcggtatttaacgaggaacttataa

SEQ ID NO: 985 - protein, 6 aa, synthetic construct
STHASR

SEQ ID NO: 986 - protein, 6 aa, synthetic construct
SQHKSG

SEQ ID NO: 987 - DNA, 1184 bp, synthetic construct
  source 1..1184: mol_type = other DNA
cgtgaggctccggtgcccgtcagtgggcagagcgcacatcgcccacagtccccgagaagttggggggaggggtcggcaattgaaccggtgcctagagaaggtggcgcggggtaaactgggaaagtgatgtcgtgtactggctccgcctttttcccgagggtgggggagaaccgtatataagtgcagtagtcgccgtgaacgttctttttcgcaacgggtttgccgccagaacacaggtaagtgccgtgtgtggttcccgcgggcctggcctctttacgggttatggcccttgcgtgccttgaattacttccacctggctgcagtacgtgattcttgatcccgagcttcgggttggaagtgggtgggagagttcgaggccttgcgcttaaggagccccttcgcctcgtgcttgagttgaggcctggcctgggcgctggggccgccgcgtgcgaatctggtggcaccttcgcgcctgtctcgctgctttcgataagtctctagccatttaaaatttttgatgacctgctgcgacgctttttttctggcaagatagtcttgtaaatgcgggccaagatctgcacactggtatttcggtttttggggccgcgggcggcgacggggcccgtgcgtcccagcgcacatgttcggcgaggcggggcctgcgagcgcggccaccgagaatcggacgggggtagtctcaagctggccggcctgctctggtgcctggcctcgcgccgccgtgtatcgccccgccctgggcggcaaggctggcccggtcggcaccagttgcgtgagcggaaagatggccgcttcccggccctgctgcagggagctcaaaatggaggacgcggcgctcgggagagcgggcgggtgagtcacccacacaaaggaaaagggcctttccgtcctcagccgtcgcttcatgtgactccacggagtaccgggcgccgtccaggcacctcgattagttctcgagcttttggagtacgtcgtctttaggttggggggaggggttttatgcgatggagtttccccacactgagtgggtggagactgaagttaggccagcttggcacttgatgtaattctccttggaatttgccctttttgagtttggatcttggttcattctcaagcctcagacagtggttcaaagtttttttcttccatttcaggtgtcgtga

SEQ ID NO: 988 - DNA, 227 bp, synthetic construct
  source 1..227: mol_type = other DNA
gcccgtcagtgggcagagcgcacatcgcccacagtccccgagaagttggggggaggggtcggcaattgaaccggtgcctagagaaggtggcgcggggtaaactgggaaagtgatgtcgtgtactggctccgcctttttcccgagggtgggggagaaccgtatataagtgcagtagtcgccgtgaacgttctttttcgcaacgggtttgccgccagaacacgcgtaag

SEQ ID NO: 989 - protein, 6 aa, synthetic construct
GPDSPH

SEQ ID NO: 990 - DNA, 16 bp, synthetic construct
  source 1..16: mol_type = other DNA
ggtggagaagagcatg

SEQ ID NO: 991 - DNA, 27 bp, synthetic construct
  source 1..27: mol_type = other DNA
gtcatcactgaggtggagaagagcatg

SEQ ID NO: 992 - protein, 6 aa, synthetic construct
GMGSPH

SEQ ID NO: 993 - protein, 6 aa, synthetic construct
GQVSPH

SEQ ID NO: 994 - protein, 6 aa, synthetic construct
GHNSPH

SEQ ID NO: 995 - DNA, 222 bp, synthetic construct
  source 1..222: mol_type = other DNA
gcccgtcagtgggcagagcgcacatcgcccacagtccccgagaagttggggggaggggtcggcaattgaaccggtgcctagagaaggtggcgcggggtaaactgggaaagtgatgtcgtgtactggctccgcctttttcccgagggtgggggagaaccgtatataagtgcagtagtcgccgtgaacgttctttttcgcaacgggtttgccgccagaacacag

SEQ ID NO: 996 - DNA, 222 bp, synthetic construct
  source 1..222: mol_type = other DNA
gcccgtcagtgggcagagcgcacatcgcccacagtccccgagaagttggggggaggggtcggcaattgaaccggtgcctagagaaggtggcgcggggtaaactgggaaagtgatgtcgtgtactggctccgcctttttcccgagggtgggggagaaccgtatataagtgcagtagtcgccgtgaacgttctttttcgcaacgggtttgccgccagaacacgc

SEQ ID NO: 997 - protein, 6 aa, synthetic construct
GHPSPH

SEQ ID NO: 998 - DNA, 229 bp, synthetic construct
  source 1..229: mol_type = other DNA
gtgcccgtcagtgggcagagcgcacatcgcccacagtccccgagaagttggggggaggggtcggcaattgaaccggtgcctagagaaggtggcgcggggtaaactgggaaagtgatgtcgtgtactggctccgcctttttcccgagggtgggggagaaccgtatataagtgcagtagtcgccgtgaacgttctttttcgcaacgggtttgccgccagaacacgcgtaag

SEQ ID NO: 999 - DNA, 235 bp, synthetic construct
  source 1..235: mol_type = other DNA
gctccggtgcccgtcagtgggcagagcgcacatcgcccacagtccccgagaagttggggggaggggtcggcaattgaaccggtgcctagagaaggtggcgcggggtaaactgggaaagtgatgtcgtgtactggctccgcctttttcccgagggtgggggagaaccgtatataagtgcagtagtcgccgtgaacgttctttttcgcaacgggtttgccgccagaacacgcgtaag

SEQ ID NO: 1000 - DNA, 241 bp, synthetic construct
  source 1..241: mol_type = other DNA
cgtgaggctccggtgcccgtcagtgggcagagcgcacatcgcccacagtccccgagaagttggggggaggggtcggcaattgaaccggtgcctagagaaggtggcgcggggtaaactgggaaagtgatgtcgtgtactggctccgcctttttcccgagggtgggggagaaccgtatataagtgcagtagtcgccgtgaacgttctttttcgcaacgggtttgccgccagaacacgcgtaag

SEQ ID NO: 1001 - DNA, 236 bp, synthetic construct
  source 1..236: mol_type = other DNA
cgtgaggctccggtgcccgtcagtgggcagagcgcacatcgcccacagtccccgagaagttggggggaggggtcggcaattgaaccggtgcctagagaaggtggcgcggggtaaactgggaaagtgatgtcgtgtactggctccgcctttttcccgagggtgggggagaaccgtatataagtgcagtagtcgccgtgaacgttctttttcgcaacgggtttgccgccagaacacag

SEQ ID NO: 1002 - DNA, 246 bp, synthetic construct
  source 1..246: mol_type = other DNA
gcatgcgtgaggctccggtgcccgtcagtgggcagagcgcacatcgcccacagtccccgagaagttggggggaggggtcggcaattgaaccggtgcctagagaaggtggcgcggggtaaactgggaaagtgatgtcgtgtactggctccgcctttttcccgagggtgggggagaaccgtatataagtgcagtagtcgccgtgaacgttctttttcgcaacgggtttgccgccagaacacgcgtaag

SEQ ID NO: 1003 - DNA, 241 bp, synthetic construct
  source 1..241: mol_type = other DNA
gcatgcgtgaggctccggtgcccgtcagtgggcagagcgcacatcgcccacagtccccgagaagttggggggaggggtcggcaattgaaccggtgcctagagaaggtggcgcggggtaaactgggaaagtgatgtcgtgtactggctccgcctttttcccgagggtgggggagaaccgtatataagtgcagtagtcgccgtgaacgttctttttcgcaacgggtttgccgccagaacacag

SEQ ID NO: 1004 - DNA, 257 bp, synthetic construct
  source 1..257: mol_type = other DNA
ggtggagaagagcatgcgtgaggctccggtgcccgtcagtgggcagagcgcacatcgcccacagtccccgagaagttggggggaggggtcggcaattgaaccggtgcctagagaaggtggcgcggggtaaactgggaaagtgatgtcgtgtactggctccgcctttttcccgagggtgggggagaaccgtatataagtgcagtagtcgccgtgaacgttctttttcgcaacgggtttgccgccagaacacgcgtaag

SEQ ID NO: 1005 - DNA, 252 bp, synthetic construct
  source 1..252: mol_type = other DNA
ggtggagaagagcatgcgtgaggctccggtgcccgtcagtgggcagagcgcacatcgcccacagtccccgagaagttggggggaggggtcggcaattgaaccggtgcctagagaaggtggcgcggggtaaactgggaaagtgatgtcgtgtactggctccgcctttttcccgagggtgggggagaaccgtatataagtgcagtagtcgccgtgaacgttctttttcgcaacgggtttgccgccagaacacag

SEQ ID NO: 1006 - DNA, 268 bp, synthetic construct
  source 1..268: mol_type = other DNA
gtcatcactgaggtggagaagagcatgcgtgaggctccggtgcccgtcagtgggcagagcgcacatcgcccacagtccccgagaagttggggggaggggtcggcaattgaaccggtgcctagagaaggtggcgcggggtaaactgggaaagtgatgtcgtgtactggctccgcctttttcccgagggtgggggagaaccgtatataagtgcagtagtcgccgtgaacgttctttttcgcaacgggtttgccgccagaacacgcgtaag

SEQ ID NO: 1007 - DNA, 263 bp, synthetic construct
  source 1..263: mol_type = other DNA
gtcatcactgaggtggagaagagcatgcgtgaggctccggtgcccgtcagtgggcagagcgcacatcgcccacagtccccgagaagttggggggaggggtcggcaattgaaccggtgcctagagaaggtggcgcggggtaaactgggaaagtgatgtcgtgtactggctccgcctttttcccgagggtgggggagaaccgtatataagtgcagtagtcgccgtgaacgttctttttcgcaacgggtttgccgccagaacacag

SEQ ID NO: 1008 - protein, 6 aa, synthetic construct
GHSSPH

SEQ ID NO: 1009 - protein, 7 aa, synthetic construct
SGSPHSK

SEQ ID NO: 1010 - protein, 7 aa, synthetic construct
HDSPHKS

SEQ ID NO: 1011 - protein, 7 aa, synthetic construct
SGSPHAR

SEQ ID NO: 1012 - protein, 7 aa, synthetic construct
SGSPHVK

SEQ ID NO: 1013 - protein, 7 aa, synthetic construct
QDSPHKS

SEQ ID NO: 1014 - protein, 7 aa, synthetic construct
SGSPHKK

SEQ ID NO: 1015 - protein, 7 aa, synthetic construct
SGSPHVR

SEQ ID NO: 1016 - protein, 7 aa, synthetic construct
SGSPHAS

SEQ ID NO: 1017 - protein, 7 aa, synthetic construct
SGSPHRK

SEQ ID NO: 1018 - protein, 7 aa, synthetic construct
SGSPHKT

SEQ ID NO: 1019 - protein, 7 aa, synthetic construct
SHSPHKS

SEQ ID NO: 1020 - protein, 7 aa, synthetic construct
QSSPHRS

SEQ ID NO: 1021 - protein, 7 aa, synthetic construct
RGSPHAS

SEQ ID NO: 1022 - protein, 7 aa, synthetic construct
RGSPHSK

SEQ ID NO: 1023 - protein, 7 aa, synthetic construct
SGSPHKF

SEQ ID NO: 1024 - protein, 7 aa, synthetic construct
SGSPHKI

SEQ ID NO: 1025 - protein, 7 aa, synthetic construct
SGSPHKL

SEQ ID NO: 1026 - protein, 7 aa, synthetic construct
SGSPHKY

SEQ ID NO: 1027 - protein, 7 aa, synthetic construct
SGSPHTR

SEQ ID NO: 1028 - protein, 7 aa, synthetic construct
SHSPHKR

SEQ ID NO: 1029 - protein, 7 aa, synthetic construct
SGSPHGA

SEQ ID NO: 1030 - protein, 7 aa, synthetic construct
HDSPHKR

SEQ ID NO: 1031 - protein, 7 aa, synthetic construct
DDSPHKS

SEQ ID NO: 1032 - protein, 7 aa, synthetic construct
HESPHKS

SEQ ID NO: 1033 - protein, 7 aa, synthetic construct
NYSPHKI

SEQ ID NO: 1034 - protein, 7 aa, synthetic construct
SGSPHSR

SEQ ID NO: 1035 - protein, 7 aa, synthetic construct
SGSPHSL

SEQ ID NO: 1036 - protein, 7 aa, synthetic construct
SGSPHSS

SEQ ID NO: 1037 - protein, 7 aa, synthetic construct
VGSPHSK

SEQ ID NO: 1038 - protein, 7 aa, synthetic construct
SCSPHRK

SEQ ID NO: 1039 - protein, 7 aa, synthetic construct
SGSPHFL

SEQ ID NO: 1040 - protein, 7 aa, synthetic construct
LLSPHWK

SEQ ID NO: 1041 - protein, 7 aa, synthetic construct
NGSPHSK

SEQ ID NO: 1042 - protein, 7 aa, synthetic construct
PGSPHSK

SEQ ID NO: 1043 - protein, 7 aa, synthetic construct
GGSPHSK

SEQ ID NO: 1044 - protein, 7 aa, synthetic construct
TGSPHSK

SEQ ID NO: 1045 - protein, 7 aa, synthetic construct
SVSPHGK

SEQ ID NO: 1046 - protein, 7 aa, synthetic construct
SGSPHTK

SEQ ID NO: 1047 - protein, 7 aa, synthetic construct
IGSPHSK

SEQ ID NO: 1048 - protein, 7 aa, synthetic construct
DGSPHSK

SEQ ID NO: 1049 - protein, 7 aa, synthetic construct
SGSPHNK

SEQ ID NO: 1050 - protein, 7 aa, synthetic construct
LGSPHSK

SEQ ID NO: 1051 - protein, 7 aa, synthetic construct
AGSPHSK

SEQ ID NO: 1052 - protein, 7 aa, synthetic construct
EGSPHSK

SEQ ID NO: 1053 - protein, 7 aa, synthetic construct
SASPHSK

SEQ ID NO: 1054 - protein, 7 aa, synthetic construct
SGSPHAK

SEQ ID NO: 1055 - protein, 7 aa, synthetic construct
HDSPHKI

SEQ ID NO: 1056 - protein, 7 aa, synthetic construct
YDSPHKS

SEQ ID NO: 1057 - protein, 7 aa, synthetic construct
HDSPHKT

SEQ ID NO: 1058 - protein, 7 aa, synthetic construct
RGSPHKR

SEQ ID NO: 1059 - protein, 7 aa, synthetic construct
HGSPHSK

SEQ ID NO: 1060 - protein, 7 aa, synthetic construct
RDSPHKS

SEQ ID NO: 1061 - protein, 7 aa, synthetic construct
NDSPHKS

SEQ ID NO: 1062 - protein, 7 aa, synthetic construct
QDSPHKI

SEQ ID NO: 1063 - protein, 7 aa, synthetic construct
PDSPHKI

SEQ ID NO: 1064 - protein, 7 aa, synthetic construct
PDSPHKS

SEQ ID NO: 1065 - protein, 7 aa, synthetic construct
MGSPHSK

SEQ ID NO: 1066 - protein, 7 aa, synthetic construct
HDSPHKH

SEQ ID NO: 1067 - protein, 7 aa, synthetic construct
QVSPHKS

SEQ ID NO: 1068 - protein, 7 aa, synthetic construct
HNSPHKS

SEQ ID NO: 1069 - protein, 7 aa, synthetic construct
NGSPHKR

SEQ ID NO: 1070 - protein, 7 aa, synthetic construct
HDSPHKY

SEQ ID NO: 1071 - protein, 7 aa, synthetic construct
NDSPHKI

SEQ ID NO: 1072 - protein, 7 aa, synthetic construct
HDSPHKL

SEQ ID NO: 1073 - protein, 7 aa, synthetic construct
HPSPHWK

SEQ ID NO: 1074 - protein, 7 aa, synthetic construct
HDSPHKM

SEQ ID NO: 1075 - protein, 7 aa, synthetic construct
HSSPHRS

SEQ ID NO: 1076 - protein, 9 aa, synthetic construct
GSGSPHARM

SEQ ID NO: 1077 - protein, 9 aa, synthetic construct
GSGSPHVKS

SEQ ID NO: 1078 - protein, 9 aa, synthetic construct
GQDSPHKSG

SEQ ID NO: 1079 - protein, 9 aa, synthetic construct
GSGSPHASR

SEQ ID NO: 1080 - protein, 9 aa, synthetic construct
GSGSPHVKI

SEQ ID NO: 1081 - protein, 9 aa, synthetic construct
GSGSPHKKN

SEQ ID NO: 1082 - protein, 9 aa, synthetic construct
GSGSPHVRM

SEQ ID NO: 1083 - protein, 9 aa, synthetic construct
VSGSPHSKA

SEQ ID NO: 1084 - protein, 9 aa, synthetic construct
CSGSPHSKA

SEQ ID NO: 1085 - protein, 9 aa, synthetic construct
GSGSPHRKA

SEQ ID NO: 1086 - protein, 9 aa, synthetic construct
CSGSPHKTS

SEQ ID NO: 1087 - protein, 9 aa, synthetic construct
CSHSPHKSG

SEQ ID NO: 1088 - protein, 9 aa, synthetic construct
GQSSPHRSG

SEQ ID NO: 1089 - protein, 9 aa, synthetic construct
GRGSPHASR

SEQ ID NO: 1090 - protein, 9 aa, synthetic construct
GRGSPHSKA

SEQ ID NO: 1091 - protein, 9 aa, synthetic construct
GSGSPHKFG

SEQ ID NO: 1092 - protein, 9 aa, synthetic construct
GSGSPHKIG

SEQ ID NO: 1093 - protein, 9 aa, synthetic construct
GSGSPHKLG

SEQ ID NO: 1094 - protein, 9 aa, synthetic construct
GSGSPHKTS

SEQ ID NO: 1095 - protein, 9 aa, synthetic construct
GSGSPHKTT

SEQ ID NO: 1096 - protein, 9 aa, synthetic construct
GSGSPHKTY

SEQ ID NO: 1097 - protein, 9 aa, synthetic construct
GSGSPHKYG

SEQ ID NO: 1098 - protein, 9 aa, synthetic construct
GSGSPHSKD

SEQ ID NO: 1099 - protein, 9 aa, synthetic construct
GSGSPHSKP

SEQ ID NO: 1100 - protein, 9 aa, synthetic construct
GSGSPHTRG

SEQ ID NO: 1101 - protein, 9 aa, synthetic construct
GSGSPHVRG

SEQ ID NO: 1102 - protein, 9 aa, synthetic construct
GSHSPHKRG

SEQ ID NO: 1103 - protein, 9 aa, synthetic construct
GSHSPHKSG

SEQ ID NO: 1104 - protein, 9 aa, synthetic construct
VSGSPHASR

SEQ ID NO: 1105 - protein, 9 aa, synthetic construct
VSGSPHGAR

SEQ ID NO: 1106 - protein, 9 aa, synthetic construct
VSGSPHKFG

SEQ ID NO: 1107 - protein, 9 aa, synthetic construct
GHDSPHKRG

SEQ ID NO: 1108 - protein, 9 aa, synthetic construct
GDDSPHKSG

SEQ ID NO: 1109 - protein, 9 aa, synthetic construct
GHESPHKSA

SEQ ID NO: 1110 - protein, 9 aa, synthetic construct
GHDSPHKSA

SEQ ID NO: 1111 - protein, 9 aa, synthetic construct
GNYSPHKIG

SEQ ID NO: 1112 - protein, 9 aa, synthetic construct
GHDSPHKSR

SEQ ID NO: 1113 - protein, 9 aa, synthetic construct
GSGSPHSKL

SEQ ID NO: 1114 - protein, 9 aa, synthetic construct
GSGSPHSRA

SEQ ID NO: 1115 - protein, 9 aa, synthetic construct
GSGSPHSKR

SEQ ID NO: 1116 - protein, 9 aa, synthetic construct
GSGSPHSLR

SEQ ID NO: 1117 - protein, 9 aa, synthetic construct
GSGSPHSRG

SEQ ID NO: 1118 - protein, 9 aa, synthetic construct
GSGSPHSSR

SEQ ID NO: 1119 - protein, 9 aa, synthetic construct
RVGSPHSKA

SEQ ID NO: 1120 - protein, 9 aa, synthetic construct
GSCSPHRKA

SEQ ID NO: 1121 - protein, 9 aa, synthetic construct
GSGSPHFLR

SEQ ID NO: 1122 - protein, 9 aa, synthetic construct
GSGSPHSKW

SEQ ID NO: 1123 - protein, 9 aa, synthetic construct
GSGSPHSKS

SEQ ID NO: 1124 - protein, 9 aa, synthetic construct
GLLSPHWKA

SEQ ID NO: 1125 - protein, 9 aa, synthetic construct
GSGSPHVRR

SEQ ID NO: 1126 - protein, 9 aa, synthetic construct
GSGSPHSKV

SEQ ID NO: 1127 - protein, 9 aa, synthetic construct
MSGSPHSKA

SEQ ID NO: 1128 - protein, 9 aa, synthetic construct
RNGSPHSKA

SEQ ID NO: 1129 - protein, 9 aa, synthetic construct
TSGSPHSKA

SEQ ID NO: 1130 - protein, 9 aa, synthetic construct
ISGSPHSKA

SEQ ID NO: 1131 - protein, 9 aa, synthetic construct
GPGSPHSKA

SEQ ID NO: 1132 - protein, 9 aa, synthetic construct
GSGSPHSKT

SEQ ID NO: 1133 - protein, 9 aa, synthetic construct
ESGSPHSKA

SEQ ID NO: 1134 - protein, 9 aa, synthetic construct
SSGSPHSKA

SEQ ID NO: 1135 - protein, 9 aa, synthetic construct
GNGSPHSKA

SEQ ID NO: 1136 - protein, 9 aa, synthetic construct
ASGSPHSKA

SEQ ID NO: 1137 - protein, 9 aa, synthetic construct
NSGSPHSKA

SEQ ID NO: 1138 - protein, 9 aa, synthetic construct
LSGSPHSKA

SEQ ID NO: 1139 - protein, 9 aa, synthetic construct
GGGSPHSKA

SEQ ID NO: 1140 - protein, 9 aa, synthetic construct
KSGSPHSKA

SEQ ID NO: 1141 - protein, 9 aa, synthetic construct
GGGSPHSKS

SEQ ID NO: 1142 - protein, 9 aa, synthetic construct
GSGSPHSKG

SEQ ID NO: 1143 - protein, 9 aa, synthetic construct
HSGSPHSKA

SEQ ID NO: 1144 - protein, 9 aa, synthetic construct
GTGSPHSKA

SEQ ID NO: 1145 - protein, 9 aa, synthetic construct
PSGSPHSKA

SEQ ID NO: 1146 - protein, 9 aa, synthetic construct
GSVSPHGKA

SEQ ID NO: 1147 - protein, 9 aa, synthetic construct
RSGSPHSKA

SEQ ID NO: 1148 - protein, 9 aa, synthetic construct
GSGSPHTKA

SEQ ID NO: 1149 - protein, 9 aa, synthetic construct
GIGSPHSKA

SEQ ID NO: 1150 - protein, 9 aa, synthetic construct
WSGSPHSKA

SEQ ID NO: 1151 - protein, 9 aa, synthetic construct
DSGSPHSKA

SEQ ID NO: 1152 - protein, 9 aa, synthetic construct
IDGSPHSKA

SEQ ID NO: 1153 - protein, 9 aa, synthetic construct
GSGSPHNKA

SEQ ID NO: 1154 - protein, 9 aa, synthetic construct
GLGSPHSKS

SEQ ID NO: 1155 - protein, 9 aa, synthetic construct
DAGSPHSKA

SEQ ID NO: 1156 - protein, 9 aa, synthetic construct
DGGSPHSKA

SEQ ID NO: 1157 - protein, 9 aa, synthetic construct
MEGSPHSKA

SEQ ID NO: 1158 - protein, 9 aa, synthetic construct
ENGSPHSKA

SEQ ID NO: 1159 - protein, 9 aa, synthetic construct
GSASPHSKA

SEQ ID NO: 1160 - protein, 9 aa, synthetic construct
GNGSPHSKS

SEQ ID NO: 1161 - protein, 9 aa, synthetic construct
KNGSPHSKA

SEQ ID NO: 1162 - protein, 9 aa, synthetic construct
KEGSPHSKA

SEQ ID NO: 1163 - protein, 9 aa, synthetic construct
AIGSPHSKA

SEQ ID NO: 1164 - protein, 9 aa, synthetic construct
GSGSPHSKN

SEQ ID NO: 1165 - protein, 9 aa, synthetic construct
GSGSPHAKA

SEQ ID NO: 1166 - protein, 9 aa, synthetic construct
GHDSPHKIG

SEQ ID NO: 1167 - protein, 9 aa, synthetic construct
GYDSPHKSG

SEQ ID NO: 1168 - protein, 9 aa, synthetic construct
GHESPHKSG

SEQ ID NO: 1169 - protein, 9 aa, synthetic construct
GHDSPHKTG

SEQ ID NO: 1170 - protein, 9 aa, synthetic construct
GRGSPHKRG

SEQ ID NO: 1171 - protein, 9 aa, synthetic construct
GHDSPHKSL

SEQ ID NO: 1172 - protein, 9 aa, synthetic construct
GHGSPHSKA

SEQ ID NO: 1173 - protein, 9 aa, synthetic construct
GHDSPHKSE

SEQ ID NO: 1174 - protein, 9 aa, synthetic construct
GRDSPHKSG

SEQ ID NO: 1175 - protein, 9 aa, synthetic construct
GNDSPHKSV

SEQ ID NO: 1176 - protein, 9 aa, synthetic construct
GQDSPHKIG

SEQ ID NO: 1177 - protein, 9 aa, synthetic construct
GHDSPHKSV

SEQ ID NO: 1178 - protein, 9 aa, synthetic construct
GPDSPHKIG

SEQ ID NO: 1179 - protein, 9 aa, synthetic construct
GPDSPHKSG

SEQ ID NO: 1180 - protein, 9 aa, synthetic construct
GHDSPHKSW

SEQ ID NO: 1181 - protein, 9 aa, synthetic construct
GHDSPHKSN

SEQ ID NO: 1182 - protein, 9 aa, synthetic construct
GMGSPHSKT

SEQ ID NO: 1183 - protein, 9 aa, synthetic construct
GHDSPHKHG

SEQ ID NO: 1184 - protein, 9 aa, synthetic construct
GQVSPHKSG

SEQ ID NO: 1185 - protein, 9 aa, synthetic construct
GDDSPHKSV

SEQ ID NO: 1186 - protein, 9 aa, synthetic construct
GHNSPHKSG

SEQ ID NO: 1187 - protein, 9 aa, synthetic construct
GNGSPHKRG

SEQ ID NO: 1188 - protein, 9 aa, synthetic construct
GHDSPHKYG

SEQ ID NO: 1189 - protein, 9 aa, synthetic construct
GHDSPHKSQ

SEQ ID NO: 1190 - protein, 9 aa, synthetic construct
GNDSPHKIG

SEQ ID NO: 1191 - protein, 9 aa, synthetic construct
GHDSPHKSK

SEQ ID NO: 1192 - protein, 9 aa, synthetic construct
GHDSPHKLW

SEQ ID NO: 1193 - protein, 9 aa, synthetic construct
GHPSPHWKG

SEQ ID NO: 1194 - protein, 9 aa, synthetic construct
GHDSPHKMG

SEQ ID NO: 1195 - protein, 9 aa, synthetic construct
GHDSPHKMA

SEQ ID NO: 1196 - protein, 9 aa, synthetic construct
GHSSPHRSG

SEQ ID NO: 1197 - protein, 8 aa, synthetic construct
SGSPHKYG

SEQ ID NO: 1198 - protein, 4 aa, synthetic construct
QNQQ

SEQ ID NO: 1199 - protein, 4 aa, synthetic construct
WNQQ

SEQ ID NO: 1200 - protein, 4 aa, synthetic construct
QYYV

SEQ ID NO: 1201 - protein, 4 aa, synthetic construct
RRQQ

SEQ ID NO: 1202 - protein, 4 aa, synthetic construct
GCGQ

SEQ ID NO: 1203 - protein, 4 aa, synthetic construct
LRQQ

SEQ ID NO: 1204 - protein, 4 aa, synthetic construct
RNQQ

SEQ ID NO: 1205 - protein, 4 aa, synthetic construct
VNQQ

SEQ ID NO: 1206 - protein, 4 aa, synthetic construct
FRLQ

SEQ ID NO: 1207 - protein, 4 aa, synthetic construct
FNQQ

SEQ ID NO: 1208 - protein, 4 aa, synthetic construct
LLQQ

SEQ ID NO: 1209 - protein, 4 aa, synthetic construct
SNQQ

SEQ ID NO: 1210 - protein, 4 aa, synthetic construct
RLQQ

SEQ ID NO: 1211 - protein, 4 aa, synthetic construct
LNQQ

SEQ ID NO: 1212 - protein, 4 aa, synthetic construct
QRKL

SEQ ID NO: 1213 - protein, 4 aa, synthetic construct
LRRQ

SEQ ID NO: 1214 - protein, 4 aa, synthetic construct
QRLR

SEQ ID NO: 1215 - protein, 4 aa, synthetic construct
QRRL

SEQ ID NO: 1216 - protein, 4 aa, synthetic construct
RRLQ

SEQ ID NO: 1217 - protein, 4 aa, synthetic construct
RLRQ

SEQ ID NO: 1218 - protein, 4 aa, synthetic construct
SKRQ

SEQ ID NO: 1219 - protein, 4 aa, synthetic construct
QLYR

SEQ ID NO: 1220 - protein, 4 aa, synthetic construct
QLTV

SEQ ID NO: 1221 - protein, 4 aa, synthetic construct
QNKQ

SEQ ID NO: 1222 - protein, 4 aa, synthetic construct
KNQQ

SEQ ID NO: 1223 - protein, 4 aa, synthetic construct
QKQQ

SEQ ID NO: 1224 - protein, 4 aa, synthetic construct
QTQQ

SEQ ID NO: 1225 - protein, 4 aa, synthetic construct
QNHQ

SEQ ID NO: 1226 - protein, 4 aa, synthetic construct
QHQQ

SEQ ID NO: 1227 - protein, 4 aa, synthetic construct
QNQH

SEQ ID NO: 1228 - protein, 4 aa, synthetic construct
QHRQ

SEQ ID NO: 1229 - protein, 4 aa, synthetic construct
LTQQ

SEQ ID NO: 1230 - protein, 4 aa, synthetic construct
QNQW

SEQ ID NO: 1231 - protein, 4 aa, synthetic construct
QNTH

SEQ ID NO: 1232 - protein, 4 aa, synthetic construct
RRRQ

SEQ ID NO: 1233 - protein, 4 aa, synthetic construct
QYQQ

SEQ ID NO: 1234 - protein, 4 aa, synthetic construct
QNDQ

SEQ ID NO: 1235 - protein, 4 aa, synthetic construct
QNRH

SEQ ID NO: 1236 - protein, 4 aa, synthetic construct
RDQQ

SEQ ID NO: 1237 - protein, 4 aa, synthetic construct
PNLQ

SEQ ID NO: 1238 - protein, 4 aa, synthetic construct
HVRQ

SEQ ID NO: 1239 - protein, 4 aa, synthetic construct
PNQH

SEQ ID NO: 1240 - protein, 4 aa, synthetic construct
HNQQ

SEQ ID NO: 1241 - protein, 4 aa, synthetic construct
QSQQ

SEQ ID NO: 1242 - protein, 4 aa, synthetic construct
QPAK

SEQ ID NO: 1243 - protein, 4 aa, synthetic construct
QNLA

SEQ ID NO: 1244 - protein, 4 aa, synthetic construct
QNQL

SEQ ID NO: 1245 - protein, 4 aa, synthetic construct
QGQQ

SEQ ID NO: 1246 - protein, 4 aa, synthetic construct
LNRQ

SEQ ID NO: 1247 - protein, 4 aa, synthetic construct
QNPP

SEQ ID NO: 1248 - protein, 4 aa, synthetic construct
QNLQ

SEQ ID NO: 1249 - protein, 4 aa, synthetic construct
QDQE

SEQ ID NO: 1250 - protein, 4 aa, synthetic construct
QDQQ

SEQ ID NO: 1251 - protein, 4 aa, synthetic construct
HWQQ

SEQ ID NO: 1252 - protein, 4 aa, synthetic construct
PNQQ

SEQ ID NO: 1253 - protein, 4 aa, synthetic construct
PEQQ

SEQ ID NO: 1254 - protein, 4 aa, synthetic construct
QRTM

SEQ ID NO: 1255 - protein, 4 aa, synthetic construct
LHQH

SEQ ID NO: 1256 - protein, 4 aa, synthetic construct
QHRI

SEQ ID NO: 1257 - protein, 4 aa, synthetic construct
QYIH

SEQ ID NO: 1258 - protein, 4 aa, synthetic construct
QKFE

SEQ ID NO: 1259 - protein, 4 aa, synthetic construct
QFPS

SEQ ID NO: 1260 - protein, 4 aa, synthetic construct
QNPL

SEQ ID NO: 1261 - protein, 4 aa, synthetic construct
QAIK

SEQ ID NO: 1262 - protein, 7 aa, synthetic construct
TLAVPFK

SEQ ID NO: 1263 - protein, 4 aa, synthetic construct
QNRQ

SEQ ID NO: 1264 - protein, 4 aa, synthetic construct
QYQH

SEQ ID NO: 1265 - protein, 4 aa, synthetic construct
QNPQ

SEQ ID NO: 1266 - protein, 4 aa, synthetic construct
QHQL

SEQ ID NO: 1267 - protein, 4 aa, synthetic construct
QSPP

SEQ ID NO: 1268 - protein, 4 aa, synthetic construct
QAKL

SEQ ID NO: 1269 - protein, 4 aa, synthetic construct
KSQQ

SEQ ID NO: 1270 - protein, 4 aa, synthetic construct
QDRP

SEQ ID NO: 1271 - protein, 4 aa, synthetic construct
QNLG

SEQ ID NO: 1272 - protein, 4 aa, synthetic construct
QAFH

SEQ ID NO: 1273 - protein, 4 aa, synthetic construct
QNAQ

SEQ ID NO: 1274 - protein, 4 aa, synthetic construct
HNQL

SEQ ID NO: 1275 - protein, 4 aa, synthetic construct
QKLN

SEQ ID NO: 1276 - protein, 4 aa, synthetic construct
QNVQ

SEQ ID NO: 1277 - protein, 4 aa, synthetic construct
QAQQ

SEQ ID NO: 1278 - protein, 4 aa, synthetic construct
QTPP

SEQ ID NO: 1279 - protein, 4 aa, synthetic construct
QPPA

SEQ ID NO: 1280 - protein, 4 aa, synthetic construct
QERP

SEQ ID NO: 1281 - protein, 4 aa, synthetic construct
QDLQ

SEQ ID NO: 1282 - protein, 4 aa, synthetic construct
QAMH

SEQ ID NO: 1283 - protein, 4 aa, synthetic construct
QHPS

SEQ ID NO: 1284 - protein, 4 aa, synthetic construct
PGLQ

SEQ ID NO: 1285 - protein, 4 aa, synthetic construct
QGIR

SEQ ID NO: 1286 - protein, 4 aa, synthetic construct
QAPA

SEQ ID NO: 1287 - protein, 4 aa, synthetic construct
QIPP

SEQ ID NO: 1288 - protein, 4 aa, synthetic construct
QTQL

SEQ ID NO: 1289 - protein, 4 aa, synthetic construct
QAPS

SEQ ID NO: 1290 - protein, 4 aa, synthetic construct
QNTY

SEQ ID NO: 1291 - protein, 4 aa, synthetic construct
QDKQ

SEQ ID NO: 1292 - protein, 4 aa, synthetic construct
QNHL

SEQ ID NO: 1293 - protein, 4 aa, synthetic construct
QIGM

SEQ ID NO: 1294 - protein, 4 aa, synthetic construct
LNKQ

SEQ ID NO: 1295 - protein, 4 aa, synthetic construct
PNQL

SEQ ID NO: 1296 - protein, 4 aa, synthetic construct
QLQQ

SEQ ID NO: 1297 - protein, 4 aa, synthetic construct
QRMS

SEQ ID NO: 1298 - protein, 4 aa, synthetic construct
QGIL

SEQ ID NO: 1299 - protein, 4 aa, synthetic construct
QDRQ

SEQ ID NO: 1300 - protein, 4 aa, synthetic construct
RDWQ

SEQ ID NO: 1301 - protein, 4 aa, synthetic construct
QERS

SEQ ID NO: 1302 - protein, 4 aa, synthetic construct
QNYQ

SEQ ID NO: 1303 - protein, 4 aa, synthetic construct
QRTC

SEQ ID NO: 1304 - protein, 4 aa, synthetic construct
QIGH

SEQ ID NO: 1305 - protein, 4 aa, synthetic construct
QGAI

SEQ ID NO: 1306 - protein, 4 aa, synthetic construct
QVPP

SEQ ID NO: 1307 - protein, 4 aa, synthetic construct
QVQQ

SEQ ID NO: 1308 - protein, 4 aa, synthetic construct
LMRQ

SEQ ID NO: 1309 - protein, 4 aa, synthetic construct
QYSV

SEQ ID NO: 1310 - protein, 4 aa, synthetic construct
QAIT

SEQ ID NO: 1311 - protein, 4 aa, synthetic construct
QKTL

SEQ ID NO: 1312 - protein, 4 aa, synthetic construct
QLHH

SEQ ID NO: 1313 - protein, 4 aa, synthetic construct
QNII

SEQ ID NO: 1314 - protein, 4 aa, synthetic construct
QGHH

SEQ ID NO: 1315 - protein, 4 aa, synthetic construct
QSKV

SEQ ID NO: 1316 - protein, 4 aa, synthetic construct
QLPS

SEQ ID NO: 1317 - protein, 4 aa, synthetic construct
IGKQ

SEQ ID NO: 1318 - protein, 4 aa, synthetic construct
QAIH

SEQ ID NO: 1319 - protein, 4 aa, synthetic construct
QHGL

SEQ ID NO: 1320 - protein, 4 aa, synthetic construct
QFMC

SEQ ID NO: 1321 - protein, 4 aa, synthetic construct
QNQM

SEQ ID NO: 1322 - protein, 4 aa, synthetic construct
QHLQ

SEQ ID NO: 1323 - protein, 4 aa, synthetic construct
QPAR

SEQ ID NO: 1324 - protein, 4 aa, synthetic construct
QSLQ

SEQ ID NO: 1325 - protein, 4 aa, synthetic construct
QSQL

SEQ ID NO: 1326 - protein, 4 aa, synthetic construct
HSQQ

SEQ ID NO: 1327 - protein, 4 aa, synthetic construct
QMPS

SEQ ID NO: 1328 - protein, 4 aa, synthetic construct
QGSL

SEQ ID NO: 1329 - protein, 4 aa, synthetic construct
QVPA

SEQ ID NO: 1330 - protein, 4 aa, synthetic construct
HYQQ

SEQ ID NO: 1331 - protein, 4 aa, synthetic construct
QVPS

SEQ ID NO: 1332 - protein, 4 aa, synthetic construct
RGEQ

SEQ ID NO: 1333 - protein, 4 aa, synthetic construct
PGQQ

SEQ ID NO: 1334 - protein, 4 aa, synthetic construct
LEQQ

SEQ ID NO: 1335 - protein, 4 aa, synthetic construct
QNQS

SEQ ID NO: 1336 - protein, 4 aa, synthetic construct
QKVI

SEQ ID NO: 1337 - protein, 4 aa, synthetic construct
QNND

SEQ ID NO: 1338 - protein, 4 aa, synthetic construct
QSVH

SEQ ID NO: 1339 - protein, 4 aa, synthetic construct
QPLG

SEQ ID NO: 1340 - protein, 4 aa, synthetic construct
HNQE

SEQ ID NO: 1341 - protein, 4 aa, synthetic construct
QIQQ

SEQ ID NO: 1342 - protein, 4 aa, synthetic construct
QVRN

SEQ ID NO: 1343 - protein, 4 aa, synthetic construct
PSNQ

SEQ ID NO: 1344 - protein, 4 aa, synthetic construct
QVGH

SEQ ID NO: 1345 - protein, 4 aa, synthetic construct
QRDI

SEQ ID NO: 1346 - protein, 4 aa, synthetic construct
QMPN

SEQ ID NO: 1347 - protein, 4 aa, synthetic construct
RGLQ

SEQ ID NO: 1348 - protein, 4 aa, synthetic construct
PSLQ

SEQ ID NO: 1349 - protein, 4 aa, synthetic construct
QRDQ

SEQ ID NO: 1350 - protein, 4 aa, synthetic construct
QAKG

SEQ ID NO: 1351 - protein, 4 aa, synthetic construct
QSAH

SEQ ID NO: 1352 - protein, 4 aa, synthetic construct
QSTM

SEQ ID NO: 1353 - protein, 4 aa, synthetic construct
QREM

SEQ ID NO: 1354 - protein, 4 aa, synthetic construct
QYRA

SEQ ID NO: 1355 - protein, 4 aa, synthetic construct
QRQQ

SEQ ID NO: 1356 - protein, 4 aa, synthetic construct
QWQQ

SEQ ID NO: 1357 - protein, 4 aa, synthetic construct
QRMN

SEQ ID NO: 1358 - protein, 4 aa, synthetic construct
GDSQ

SEQ ID NO: 1359 - protein, 4 aa, synthetic construct
QKIS

SEQ ID NO: 1360 - protein, 4 aa, synthetic construct
PSMQ

SEQ ID NO: 1361 - protein, 4 aa, synthetic construct
SPRQ

SEQ ID NO: 1362 - protein, 4 aa, synthetic construct
MEQQ

SEQ ID NO: 1363 - protein, 4 aa, synthetic construct
QYQN

SEQ ID NO: 1364 - protein, 4 aa, synthetic construct
QIRQ

SEQ ID NO: 1365 - protein, 4 aa, synthetic construct
QSVQ

SEQ ID NO: 1366 - protein, 4 aa, synthetic construct
RSQQ

SEQ ID NO: 1367 - protein, 4 aa, synthetic construct
QNKL

SEQ ID NO: 1368 - protein, 4 aa, synthetic construct
QIQH

SEQ ID NO: 1369 - protein, 4 aa, synthetic construct
PRQQ

SEQ ID NO: 1370 - protein, 4 aa, synthetic construct
HTQQ

SEQ ID NO: 1371 - protein, 4 aa, synthetic construct
QRQH

SEQ ID NO: 1372 - protein, 4 aa, synthetic construct
RNQE

SEQ ID NO: 1373 - protein, 4 aa, synthetic construct
QSKQ

SEQ ID NO: 1374 - protein, 4 aa, synthetic construct
QNQP

SEQ ID NO: 1375 - protein, 4 aa, synthetic construct
QSPQ

SEQ ID NO: 1376 - protein, 4 aa, synthetic construct
QTRQ

SEQ ID NO: 1377 - protein, 4 aa, synthetic construct
QNLH

SEQ ID NO: 1378 - protein, 4 aa, synthetic construct
QNQE

SEQ ID NO: 1379 - protein, 4 aa, synthetic construct
LNQP

SEQ ID NO: 1380 - protein, 4 aa, synthetic construct
QNQD

SEQ ID NO: 1381 - protein, 4 aa, synthetic construct
QNLL

SEQ ID NO: 1382 - protein, 4 aa, synthetic construct
QLVI

SEQ ID NO: 1383 - protein, 4 aa, synthetic construct
RTQE

SEQ ID NO: 1384 - protein, 4 aa, synthetic construct
QTHQ

SEQ ID NO: 1385 - protein, 4 aa, synthetic construct
QDQH

SEQ ID NO: 1386 - protein, 4 aa, synthetic construct
QSQH

SEQ ID NO: 1387 - protein, 4 aa, synthetic construct
VRQQ

SEQ ID NO: 1388 - protein, 4 aa, synthetic construct
AWQQ

SEQ ID NO: 1389 - protein, 4 aa, synthetic construct
QSVP

SEQ ID NO: 1390 - protein, 4 aa, synthetic construct
QNIQ

SEQ ID NO: 1391 - protein, 4 aa, synthetic construct
LDQQ

SEQ ID NO: 1392 - protein, 4 aa, synthetic construct
PDQQ

SEQ ID NO: 1393 - protein, 4 aa, synthetic construct
ESQQ

SEQ ID NO: 1394 - protein, 4 aa, synthetic construct
QRQL

SEQ ID NO: 1395 - protein, 4 aa, synthetic construct
QIIV

SEQ ID NO: 1396 - protein, 4 aa, synthetic construct
QKQS

SEQ ID NO: 1397 - protein, 4 aa, synthetic construct
QSHQ

SEQ ID NO: 1398 - protein, 4 aa, synthetic construct
QFVV

SEQ ID NO: 1399 - protein, 4 aa, synthetic construct
QSQP

SEQ ID NO: 1400 - protein, 4 aa, synthetic construct
QNEQ

SEQ ID NO: 1401 - protein, 4 aa, synthetic construct
INQQ

SEQ ID NO: 1402 - protein, 4 aa, synthetic construct
RNRQ

SEQ ID NO: 1403 - protein, 4 aa, synthetic construct
RDQK

SEQ ID NO: 1404 - protein, 4 aa, synthetic construct
QWKR

SEQ ID NO: 1405 - protein, 4 aa, synthetic construct
ENRQ

SEQ ID NO: 1406 - protein, 4 aa, synthetic construct
QTQP

SEQ ID NO: 1407 - protein, 4 aa, synthetic construct
QKQL

SEQ ID NO: 1408 - protein, 4 aa, synthetic construct
RNQL

SEQ ID NO: 1409 - protein, 4 aa, synthetic construct
ISIQ

SEQ ID NO: 1410 - protein, 4 aa, synthetic construct
QTVC

SEQ ID NO: 1411 - protein, 4 aa, synthetic construct
QQIM

SEQ ID NO: 1412 - protein, 4 aa, synthetic construct
LNHQ

SEQ ID NO: 1413 - protein, 4 aa, synthetic construct
QNQA

SEQ ID NO: 1414 - protein, 4 aa, synthetic construct
QMIH

SEQ ID NO: 1415 - protein, 4 aa, synthetic construct
RNHQ

SEQ ID NO: 1416 - protein, 4 aa, synthetic construct
QKMN

SEQ ID NO: 1417 - protein, 5 aa, synthetic construct
QNQQT

SEQ ID NO: 1418 - protein, 5 aa, synthetic construct
QNRHT

SEQ ID NO: 1419 - protein, 5 aa, synthetic construct
RDQQT

SEQ ID NO: 1420 - protein, 5 aa, synthetic construct
PNLQT

SEQ ID NO: 1421 - protein, 5 aa, synthetic construct
HVRQT

SEQ ID NO: 1422 - protein, 5 aa, synthetic construct
PNQHT

SEQ ID NO: 1423 - protein, 5 aa, synthetic construct
QSQQT

SEQ ID NO: 1424 - protein, 5 aa, synthetic construct
QNQQI

SEQ ID NO: 1425 - protein, 5 aa, synthetic construct
QPAKT

SEQ ID NO: 1426 - protein, 5 aa, synthetic construct
QTQQN

SEQ ID NO: 1427 - protein, 5 aa, synthetic construct
QNLAT

SEQ ID NO: 1428 - protein, 5 aa, synthetic construct
QNQLT

SEQ ID NO: 1429 - protein, 5 aa, synthetic construct
QGQQT

SEQ ID NO: 1430 - protein, 5 aa, synthetic construct
LNRQS

SEQ ID NO: 1431 - protein, 5 aa, synthetic construct
HNQQT

SEQ ID NO: 1432 - protein, 5 aa, synthetic construct
QNPPT

SEQ ID NO: 1433 - protein, 5 aa, synthetic construct
QNLQT

SEQ ID NO: 1434 - protein, 5 aa, synthetic construct
QYQQT

SEQ ID NO: 1435 - protein, 5 aa, synthetic construct
QDQET

SEQ ID NO: 1436 - protein, 5 aa, synthetic construct
QNHQT

SEQ ID NO: 1437 - protein, 5 aa, synthetic construct
QDQQT

SEQ ID NO: 1438 - protein, 5 aa, synthetic construct
HWQQT

SEQ ID NO: 1439 - protein, 5 aa, synthetic construct
PNQQT

SEQ ID NO: 1440 - protein, 5 aa, synthetic construct
QNQLI

SEQ ID NO: 1441 - protein, 5 aa, synthetic construct
PEQQT

SEQ ID NO: 1442 - protein, 5 aa, synthetic construct
QRTMT

SEQ ID NO: 1443 - protein, 5 aa, synthetic construct
QNQQH

SEQ ID NO: 1444 - protein, 5 aa, synthetic construct
LHQHT

SEQ ID NO: 1445 - protein, 5 aa, synthetic construct
QHRIT

SEQ ID NO: 1446 - protein, 5 aa, synthetic construct
QYIHT

SEQ ID NO: 1447 - protein, 5 aa, synthetic construct
QKFET

SEQ ID NO: 1448 - protein, 5 aa, synthetic construct
QFPST

SEQ ID NO: 1449 - protein, 5 aa, synthetic construct
HNQQR

SEQ ID NO: 1450 - protein, 5 aa, synthetic construct
QAIKT

SEQ ID NO: 1451 - protein, 5 aa, synthetic construct
QNRQT

SEQ ID NO: 1452 - protein, 5 aa, synthetic construct
QYQHT

SEQ ID NO: 1453 - protein, 5 aa, synthetic construct
QNPQS

SEQ ID NO: 1454 - protein, 5 aa, synthetic construct
QHQLT

SEQ ID NO: 1455 - protein, 5 aa, synthetic construct
QSPPT

SEQ ID NO: 1456 - protein, 5 aa, synthetic construct
QAKLT

SEQ ID NO: 1457 - protein, 5 aa, synthetic construct
KSQQT

SEQ ID NO: 1458 - protein, 5 aa, synthetic construct
QDRPT

SEQ ID NO: 1459 - protein, 5 aa, synthetic construct
QSQQL

SEQ ID NO: 1460 - protein, 5 aa, synthetic construct
QAFHT

SEQ ID NO: 1461 - protein, 5 aa, synthetic construct
QKQQD

SEQ ID NO: 1462 - protein, 5 aa, synthetic construct
QNAQT

SEQ ID NO: 1463 - protein, 5 aa, synthetic construct
HNQLT

SEQ ID NO: 1464 - protein, 5 aa, synthetic construct
QNQQY

SEQ ID NO: 1465 - protein, 5 aa, synthetic construct
QKLNT

SEQ ID NO: 1466 - protein, 5 aa, synthetic construct
QNVQT

SEQ ID NO: 1467 - protein, 5 aa, synthetic construct
QAQQT

SEQ ID NO: 1468 - protein, 5 aa, synthetic construct
QNLQA

SEQ ID NO: 1469 - protein, 5 aa, synthetic construct
QTPPT

SEQ ID NO: 1470 - protein, 5 aa, synthetic construct
QYQHA

SEQ ID NO: 1471 - protein, 5 aa, synthetic construct
QGQQA

SEQ ID NO: 1472 - protein, 5 aa, synthetic construct
QPPAT

SEQ ID NO: 1473 - protein, 5 aa, synthetic construct
QERPT

SEQ ID NO: 1474 - protein, 5 aa, synthetic construct
QDLQT

SEQ ID NO: 1475 - protein, 5 aa, synthetic construct
QAMHT

SEQ ID NO: 1476 - protein, 5 aa, synthetic construct
LNQQT

SEQ ID NO: 1477 - protein, 5 aa, synthetic construct
QHPST

SEQ ID NO: 1478 - protein, 5 aa, synthetic construct
PGLQT

SEQ ID NO: 1479 - protein, 5 aa, synthetic construct
QGIRT

SEQ ID NO: 1480 - protein, 5 aa, synthetic construct
QAPAT

SEQ ID NO: 1481 - protein, 5 aa, synthetic construct
QSQQI

SEQ ID NO: 1482 - protein, 5 aa, synthetic construct
QIPPT

SEQ ID NO: 1483 - protein, 5 aa, synthetic construct
QTQLT

SEQ ID NO: 1484 - protein, 5 aa, synthetic construct
QAPST

SEQ ID NO: 1485 - protein, 5 aa, synthetic construct
QNTYA

SEQ ID NO: 1486 - protein, 5 aa, synthetic construct
QNQHI

SEQ ID NO: 1487 - protein, 5 aa, synthetic construct
QNHLT

SEQ ID NO: 1488 - protein, 5 aa, synthetic construct
QIGMT

SEQ ID NO: 1489 - protein, 5 aa, synthetic construct
LNKQT

SEQ ID NO: 1490 - protein, 5 aa, synthetic construct
QLQQT

SEQ ID NO: 1491 - protein, 5 aa, synthetic construct
QRMST

SEQ ID NO: 1492 - protein, 5 aa, synthetic construct
QGILT

SEQ ID NO: 1493 - protein, 5 aa, synthetic construct
QDRQT

SEQ ID NO: 1494 - protein, 5 aa, synthetic construct
RDWQT

SEQ ID NO: 1495 - protein, 5 aa, synthetic construct
QNTHD

SEQ ID NO: 1496 - protein, 5 aa, synthetic construct
PNLQI

SEQ ID NO: 1497 - protein, 5 aa, synthetic construct
QERST

SEQ ID NO: 1498 - protein, 5 aa, synthetic construct
QNYQT

SEQ ID NO: 1499 - protein, 5 aa, synthetic construct
QRTCT

SEQ ID NO: 1500 - protein, 5 aa, synthetic construct
QIGHT

SEQ ID NO: 1501 - protein, 5 aa, synthetic construct
QGAIT

SEQ ID NO: 1502 - protein, 5 aa, synthetic construct
QVPPT

SEQ ID NO: 1503 - protein, 5 aa, synthetic construct
QVQQI

SEQ ID NO: 1504 - protein, 5 aa, synthetic construct
LMRQT

SEQ ID NO: 1505 - protein, 5 aa, synthetic construct
QYSVT

SEQ ID NO: 1506 - protein, 5 aa, synthetic construct
QAITT

SEQ ID NO: 1507 - protein, 5 aa, synthetic construct
QKTLT

SEQ ID NO: 1508 - protein, 5 aa, synthetic construct
QNQWT

SEQ ID NO: 1509 - protein, 5 aa, synthetic construct
QLHHT

SEQ ID NO: 1510 - protein, 5 aa, synthetic construct
QNIII

SEQ ID NO: 1511 - protein, 5 aa, synthetic construct
QGHHT

SEQ ID NO: 1512 - protein, 5 aa, synthetic construct
QSKVT

SEQ ID NO: 1513 - protein, 5 aa, synthetic construct
QLPST

SEQ ID NO: 1514 - protein, 5 aa, synthetic construct
IGKQT

SEQ ID NO: 1515 - protein, 5 aa, synthetic construct
QAIHT

SEQ ID NO: 1516 - protein, 5 aa, synthetic construct
QHGLT

SEQ ID NO: 1517 - protein, 5 aa, synthetic construct
QFMCT

SEQ ID NO: 1518 - protein, 5 aa, synthetic construct
QHLQT

SEQ ID NO: 1519 - protein, 5 aa, synthetic construct
QNHQN

SEQ ID NO: 1520 - protein, 5 aa, synthetic construct
QPART

SEQ ID NO: 1521 - protein, 5 aa, synthetic construct
QSLQT

SEQ ID NO: 1522 - protein, 5 aa, synthetic construct
QSQLT

SEQ ID NO: 1523 - protein, 5 aa, synthetic construct
QDRQS

SEQ ID NO: 1524 - protein, 5 aa, synthetic construct
QMPST

SEQ ID NO: 1525 - protein, 5 aa, synthetic construct
QGSLT

SEQ ID NO: 1526 - protein, 5 aa, synthetic construct
QVPAT

SEQ ID NO: 1527 - protein, 5 aa, synthetic construct
QDKQT

SEQ ID NO: 1528 - protein, 5 aa, synthetic construct
HYQQT

SEQ ID NO: 1529 - protein, 5 aa, synthetic construct
QVPST

SEQ ID NO: 1530 - protein, 5 aa, synthetic construct
RGEQT

SEQ ID NO: 1531 - protein, 5 aa, synthetic construct
PGQQT

SEQ ID NO: 1532 - protein, 5 aa, synthetic construct
QSLQI

SEQ ID NO: 1533 - protein, 5 aa, synthetic construct
LEQQT

SEQ ID NO: 1534 - protein, 5 aa, synthetic construct
QNQST

SEQ ID NO: 1535 - protein, 5 aa, synthetic construct
QKVIT

SEQ ID NO: 1536 - protein, 5 aa, synthetic construct
QNNDQ

SEQ ID NO: 1537 - protein, 5 aa, synthetic construct
QSVHT

SEQ ID NO: 1538 - protein, 5 aa, synthetic construct
QPLGT

SEQ ID NO: 1539 - protein, 5 aa, synthetic construct
HNQET

SEQ ID NO: 1540 - protein, 5 aa, synthetic construct
QNLQI

SEQ ID NO: 1541 - protein, 5 aa, synthetic construct
QIQQT

SEQ ID NO: 1542 - protein, 5 aa, synthetic construct
QVRNT

SEQ ID NO: 1543 - protein, 5 aa, synthetic construct
PSNQT

SEQ ID NO: 1544 - protein, 5 aa, synthetic construct
QVGHT

SEQ ID NO: 1545 - protein, 5 aa, synthetic construct
QRDIT

SEQ ID NO: 1546 - protein, 5 aa, synthetic construct
QMPNT

SEQ ID NO: 1547 - protein, 5 aa, synthetic construct
RGLQT

SEQ ID NO: 1548 - protein, 5 aa, synthetic construct
QKQQT

SEQ ID NO: 1549 - protein, 5 aa, synthetic construct
PSLQT

SEQ ID NO: 1550 - protein, 5 aa, synthetic construct
QRDQT

SEQ ID NO: 1551 - protein, 5 aa, synthetic construct
QAKGT

SEQ ID NO: 1552 - protein, 5 aa, synthetic construct
QSAHT

SEQ ID NO: 1553 - protein, 5 aa, synthetic construct
QSTMT

SEQ ID NO: 1554 - protein, 5 aa, synthetic construct
QREMT

SEQ ID NO: 1555 - protein, 5 aa, synthetic construct
QYRAT

SEQ ID NO: 1556 - protein, 5 aa, synthetic construct
QWQQT

SEQ ID NO: 1557 - protein, 5 aa, synthetic construct
QRMNT

SEQ ID NO: 1558 - protein, 5 aa, synthetic construct
GDSQT

SEQ ID NO: 1559 - protein, 5 aa, synthetic construct
QKIST

SEQ ID NO: 1560 - protein, 5 aa, synthetic construct
PSMQT

SEQ ID NO: 1561 - protein, 5 aa, synthetic construct
SPRQT

SEQ ID NO: 1562 - protein, 5 aa, synthetic construct
MEQQT

SEQ ID NO: 1563 - protein, 5 aa, synthetic construct
QYQNT

SEQ ID NO: 1564 - protein, 5 aa, synthetic construct
QHQQT

SEQ ID NO: 1565 - protein, 5 aa, synthetic construct
INQQT

SEQ ID NO: 1566 - protein, 5 aa, synthetic construct
PNQQH

SEQ ID NO: 1567 - protein, 5 aa, synthetic construct
ENRQT

SEQ ID NO: 1568 - protein, 5 aa, synthetic construct
QTQQA

SEQ ID NO: 1569 - protein, 5 aa, synthetic construct
QNQAT

SEQ ID NO: 1570 - protein, 4 aa, synthetic construct
KTII

SEQ ID NO: 1571 - protein, 4 aa, synthetic construct
KTFP

SEQ ID NO: 1572 - protein, 4 aa, synthetic construct
KTEK

SEQ ID NO: 1573 - protein, 4 aa, synthetic construct
KTVN

SEQ ID NO: 1574 - protein, 4 aa, synthetic construct
KTFN

SEQ ID NO: 1575 - protein, 4 aa, synthetic construct
KTIN

SEQ ID NO: 1576 - protein, 4 aa, synthetic construct
TTIN

SEQ ID NO: 1577 - protein, 4 aa, synthetic construct
KSIN

SEQ ID NO: 1578 - protein, 4 aa, synthetic construct
KTER

SEQ ID NO: 1579 - protein, 4 aa, synthetic construct
KELH

SEQ ID NO: 1580 - protein, 4 aa, synthetic construct
KAIN

SEQ ID NO: 1581 - protein, 4 aa, synthetic construct
KTDN

SEQ ID NO: 1582 - protein, 4 aa, synthetic construct
KTFH

SEQ ID NO: 1583 - protein, 4 aa, synthetic construct
KTSN

SEQ ID NO: 1584 - protein, 4 aa, synthetic construct
ETIN

SEQ ID NO: 1585 - protein, 4 aa, synthetic construct
NTIN

SEQ ID NO: 1586 - protein, 4 aa, synthetic construct
KTEN

SEQ ID NO: 1587 - protein, 4 aa, synthetic construct
KTSS

SEQ ID NO: 1588 - protein, 4 aa, synthetic construct
KTCN

SEQ ID NO: 1589 - protein, 4 aa, synthetic construct
KTEH

SEQ ID NO: 1590 - protein, 4 aa, synthetic construct
KAEM

SEQ ID NO: 1591 - protein, 4 aa, synthetic construct
KATN

SEQ ID NO: 1592 - protein, 4 aa, synthetic construct
KAIK

SEQ ID NO: 1593 - protein, 4 aa, synthetic construct
KTDK

SEQ ID NO: 1594 - protein, 4 aa, synthetic construct
KTFK

SEQ ID NO: 1595 - protein, 4 aa, synthetic construct
KSDQ

SEQ ID NO: 1596 - protein, 4 aa, synthetic construct
KTEI

SEQ ID NO: 1597 - protein, 4 aa, synthetic construct
KTID

SEQ ID NO: 1598 - protein, 4 aa, synthetic construct
KNTN

SEQ ID NO: 1599 - protein, 4 aa, synthetic construct
KTET

SEQ ID NO: 1600 - protein, 4 aa, synthetic construct
KTEL

SEQ ID NO: 1601 - protein, 4 aa, synthetic construct
KNIN

SEQ ID NO: 1602 - protein, 4 aa, synthetic construct
KTEA

SEQ ID NO: 1603 - protein, 4 aa, synthetic construct
KTAN

SEQ ID NO: 1604 - protein, 4 aa, synthetic construct
NTIY

SEQ ID NO: 1605 - protein, 4 aa, synthetic construct
KTFS

SEQ ID NO: 1606 - protein, 4 aa, synthetic construct
KTES

SEQ ID NO: 1607 - protein, 4 aa, synthetic construct
KTTN

SEQ ID NO: 1608 - protein, 4 aa, synthetic construct
KTED

SEQ ID NO: 1609 - protein, 4 aa, synthetic construct
KTNN

SEQ ID NO: 1610 - protein, 4 aa, synthetic construct
KEVH

SEQ ID NO: 1611 - protein, 4 aa, synthetic construct
KTIS

SEQ ID NO: 1612 - protein, 4 aa, synthetic construct
KTVR

SEQ ID NO: 1613 - protein, 4 aa, synthetic construct
KTDR

SEQ ID NO: 1614 - protein, 4 aa, synthetic construct
ETIK

SEQ ID NO: 1615 - protein, 4 aa, synthetic construct
KNHI

SEQ ID NO: 1616 - protein, 4 aa, synthetic construct
KESD

SEQ ID NO: 1617 - protein, 4 aa, synthetic construct
KTIK

SEQ ID NO: 1618 - protein, 4 aa, synthetic construct
KTDL

SEQ ID NO: 1619 - protein, 4 aa, synthetic construct
KTVP

SEQ ID NO: 1620 - protein, 4 aa, synthetic construct
KTVI

SEQ ID NO: 1621 - protein, 4 aa, synthetic construct
KAEH

SEQ ID NO: 1622 - protein, 4 aa, synthetic construct
KNCL

SEQ ID NO: 1623 - protein, 4 aa, synthetic construct
KTVK

SEQ ID NO: 1624 - protein, 4 aa, synthetic construct
KNAD

SEQ ID NO: 1625 - protein, 4 aa, synthetic construct
KTIT

SEQ ID NO: 1626 - protein, 4 aa, synthetic construct
KNCV

SEQ ID NO: 1627 - protein, 4 aa, synthetic construct
KNAL

SEQ ID NO: 1628 - protein, 4 aa, synthetic construct
KVIN

SEQ ID NO: 1629 - protein, 4 aa, synthetic construct
KTEF

SEQ ID NO: 1630 - protein, 4 aa, synthetic construct
KTRE

SEQ ID NO: 1631 - protein, 4 aa, synthetic construct
KQGE

SEQ ID NO: 1632 - protein, 4 aa, synthetic construct
KSEK

SEQ ID NO: 1633 - protein, 4 aa, synthetic construct
KNVN

SEQ ID NO: 1634 - protein, 4 aa, synthetic construct
KGGE

SEQ ID NO: 1635 - protein, 4 aa, synthetic construct
KEFV

SEQ ID NO: 1636 - protein, 4 aa, synthetic construct
KSDK

SEQ ID NO: 1637 - protein, 4 aa, synthetic construct
KTEQ

SEQ ID NO: 1638 - protein, 4 aa, synthetic construct
KEVQ

SEQ ID NO: 1639 - protein, 4 aa, synthetic construct
KTEY

SEQ ID NO: 1640 - protein, 4 aa, synthetic construct
KNCW

SEQ ID NO: 1641 - protein, 4 aa, synthetic construct
KTDV

SEQ ID NO: 1642 - protein, 4 aa, synthetic construct
KSDI

SEQ ID NO: 1643 - protein, 4 aa, synthetic construct
KNSI

SEQ ID NO: 1644 - protein, 4 aa, synthetic construct
KNSL

SEQ ID NO: 1645 - protein, 4 aa, synthetic construct
KEVV

SEQ ID NO: 1646 - protein, 4 aa, synthetic construct
KTEP

SEQ ID NO: 1647 - protein, 4 aa, synthetic construct
KSEL

SEQ ID NO: 1648 - protein, 4 aa, synthetic construct
KTWQ

SEQ ID NO: 1649 - protein, 4 aa, synthetic construct
KTEV

SEQ ID NO: 1650 - protein, 4 aa, synthetic construct
KAVN

SEQ ID NO: 1651 - protein, 4 aa, synthetic construct
KGVL

SEQ ID NO: 1652 - protein, 4 aa, synthetic construct
KTEG

SEQ ID NO: 1653 - protein, 4 aa, synthetic construct
KTRD

SEQ ID NO: 1654 - protein, 4 aa, synthetic construct
KTGN

SEQ ID NO: 1655 - protein, 4 aa, synthetic construct
KNAI

SEQ ID NO: 1656 - protein, 4 aa, synthetic construct
KAEN

SEQ ID NO: 1657 - protein, 4 aa, synthetic construct
KAET

SEQ ID NO: 1658 - protein, 4 aa, synthetic construct
KTVH

SEQ ID NO: 1659 - protein, 4 aa, synthetic construct
KETA

SEQ ID NO: 1660 - protein, 4 aa, synthetic construct
KNNL

SEQ ID NO: 1661 - protein, 4 aa, synthetic construct
EAIN

SEQ ID NO: 1662 - protein, 4 aa, synthetic construct
KSLN

SEQ ID NO: 1663 - protein, 4 aa, synthetic construct
KTIP

SEQ ID NO: 1664 - protein, 4 aa, synthetic construct
KTIH

SEQ ID NO: 1665 - protein, 5 aa, synthetic construct
NPHKS

SEQ ID NO: 1666 - protein, 6 aa, synthetic construct
NPHKSG

SEQ ID NO: 1667 - protein, 6 aa, synthetic construct
SPHKIV

SEQ ID NO: 1668 - protein, 6 aa, synthetic construct
GHDNPH

SEQ ID NO: 1669 - protein, 6 aa, synthetic construct
AHDSPH

SEQ ID NO: 1670 - protein, 6 aa, synthetic construct
KHDSPH

SEQ ID NO: 1671 - protein, 6 aa, synthetic construct
WHDSPH

SEQ ID NO: 1672 - protein, 6 aa, synthetic construct
RHDSPH

SEQ ID NO: 1673 - protein, 6 aa, synthetic construct
LHDSPH

SEQ ID NO: 1674 - protein, 6 aa, synthetic construct
IHDSPH

SEQ ID NO: 1675 - protein, 6 aa, synthetic construct
MHDSPH

SEQ ID NO: 1676 - protein, 6 aa, synthetic construct
NHDSPH

SEQ ID NO: 1677 - protein, 6 aa, synthetic construct
THDSPH

SEQ ID NO: 1678 - protein, 6 aa, synthetic construct
EHDSPH

SEQ ID NO: 1679 - protein, 6 aa, synthetic construct
QHDSPH

SEQ ID NO: 1680 - protein, 6 aa, synthetic construct
YHDSPH

SEQ ID NO: 1681 - protein, 6 aa, synthetic construct
HHDSPH

SEQ ID NO: 1682 - protein, 6 aa, synthetic construct
FHDSPH

SEQ ID NO: 1683 - protein, 6 aa, synthetic construct
VHDSPH

SEQ ID NO: 1684 - protein, 9 aa, synthetic construct
GHDNPHKSG

SEQ ID NO: 1685 - protein, 9 aa, synthetic construct
AHDSPHKSG

SEQ ID NO: 1686 - protein, 9 aa, synthetic construct
AHDSPHKIG

SEQ ID NO: 1687 - protein, 9 aa, synthetic construct
KHDSPHKSG

SEQ ID NO: 1688 - protein, 9 aa, synthetic construct
WHDSPHKSG

SEQ ID NO: 1689 - protein, 9 aa, synthetic construct
RHDSPHKSG

SEQ ID NO: 1690 - protein, 9 aa, synthetic construct
LHDSPHKSG

SEQ ID NO: 1691 - protein, 9 aa, synthetic construct
IHDSPHKSG

SEQ ID NO: 1692 - protein, 9 aa, synthetic construct
MHDSPHKSG

SEQ ID NO: 1693 - protein, 9 aa, synthetic construct
NHDSPHKSG

SEQ ID NO: 1694 - protein, 9 aa, synthetic construct
THDSPHKSG

SEQ ID NO: 1695 - protein, 9 aa, synthetic construct
EHDSPHKSG

SEQ ID NO: 1696 - protein, 9 aa, synthetic construct
QHDSPHKSG

SEQ ID NO: 1697 - protein, 9 aa, synthetic construct
RHDSPHKIV

SEQ ID NO: 1698 - protein, 9 aa, synthetic construct
YHDSPHKSG

SEQ ID NO: 1699 - protein, 9 aa, synthetic construct
HHDSPHKSG

SEQ ID NO: 1700 - protein, 9 aa, synthetic construct
FHDSPHKSG

SEQ ID NO: 1701 - protein, 9 aa, synthetic construct
VHDSPHKSG

SEQ ID NO: 1702 - protein, 5 aa, synthetic construct
QIRQT

SEQ ID NO: 1703 - protein, 5 aa, synthetic construct
QNQHA

SEQ ID NO: 1704 - protein, 5 aa, synthetic construct
QSVQT

SEQ ID NO: 1705 - protein, 5 aa, synthetic construct
RSQQT

SEQ ID NO: 1706 - protein, 5 aa, synthetic construct
QNKLE

SEQ ID NO: 1707 - protein, 5 aa, synthetic construct
QNQQK

SEQ ID NO: 1708 - protein, 5 aa, synthetic construct
QHQQA

SEQ ID NO: 1709 - protein, 5 aa, synthetic construct
QIQHT

SEQ ID NO: 1710 - protein, 5 aa, synthetic construct
PRQQT

SEQ ID NO: 1711 - protein, 5 aa, synthetic construct
HTQQT

SEQ ID NO: 1712 - protein, 5 aa, synthetic construct
QRQHT

SEQ ID NO: 1713 - protein, 5 aa, synthetic construct
QNQQS

SEQ ID NO: 1714 - protein, 5 aa, synthetic construct
RNQET

SEQ ID NO: 1715 - protein, 5 aa, synthetic construct
KNQQT

SEQ ID NO: 1716 - protein, 5 aa, synthetic construct
QTQQT

SEQ ID NO: 1717 - protein, 5 aa, synthetic construct
QTQQI

SEQ ID NO: 1718 - protein, 5 aa, synthetic construct
QSKQA

SEQ ID NO: 1719 - protein, 5 aa, synthetic construct
QNQPP

SEQ ID NO: 1720 - protein, 5 aa, synthetic construct
QSPQT

SEQ ID NO: 1721 - protein, 5 aa, synthetic construct
QNQQG

SEQ ID NO: 1722 - protein, 5 aa, synthetic construct
QNQHT

SEQ ID NO: 1723 - protein, 5 aa, synthetic construct
QTRQT

SEQ ID NO: 1724 - protein, 5 aa, synthetic construct
QNLHT

SEQ ID NO: 1725 - protein, 5 aa, synthetic construct
QNQET

SEQ ID NO: 1726 - protein, 5 aa, synthetic construct
LNQPT

SEQ ID NO: 1727 - protein, 5 aa, synthetic construct
QNQDT

SEQ ID NO: 1728 - protein, 5 aa, synthetic construct
RNQQT

SEQ ID NO: 1729 - protein, 5 aa, synthetic construct
QNLLT

SEQ ID NO: 1730 - protein, 5 aa, synthetic construct
QLVIT

SEQ ID NO: 1731 - protein, 5 aa, synthetic construct
RTQET

SEQ ID NO: 1732 - protein, 5 aa, synthetic construct
QTHQT

SEQ ID NO: 1733 - protein, 5 aa, synthetic construct
QNQPA

SEQ ID NO: 1734 - protein, 5 aa, synthetic construct
QDQHT

SEQ ID NO: 1735 - protein, 5 aa, synthetic construct
QSQHT

SEQ ID NO: 1736 - protein, 5 aa, synthetic construct
RNQQI

SEQ ID NO: 1737 - protein, 5 aa, synthetic construct
VRQQT

SEQ ID NO: 1738 - protein, 5 aa, synthetic construct
QNQHS

SEQ ID NO: 1739 - protein, 5 aa, synthetic construct
AWQQT

SEQ ID NO: 1740 - protein, 5 aa, synthetic construct
QSVPT

SEQ ID NO: 1741 - protein, 5 aa, synthetic construct
QNIQP

SEQ ID NO: 1742 - protein, 5 aa, synthetic construct
QNHLN

SEQ ID NO: 1743 - protein, 5 aa, synthetic construct
LDQQT

SEQ ID NO: 1744 - protein, 5 aa, synthetic construct
PDQQS

SEQ ID NO: 1745 - protein, 5 aa, synthetic construct
ESQQT

SEQ ID NO: 1746 - protein, 5 aa, synthetic construct
QNKQT

SEQ ID NO: 1747 - protein, 5 aa, synthetic construct
QRQLT

SEQ ID NO: 1748 - protein, 5 aa, synthetic construct
QIIVT

SEQ ID NO: 1749 - protein, 5 aa, synthetic construct
QKQST

SEQ ID NO: 1750 - protein, 5 aa, synthetic construct
QSHQT

SEQ ID NO: 1751 - protein, 5 aa, synthetic construct
QFVVT

SEQ ID NO: 1752 - protein, 5 aa, synthetic construct
QSQPT

SEQ ID NO: 1753 - protein, 5 aa, synthetic construct
QNEQT

SEQ ID NO: 1754 - protein, 18 aa, synthetic construct
KAEIGHDSPHKSGQNQQT

SEQ ID NO: 1755 - protein, 5 aa, synthetic construct
RNRQT

SEQ ID NO: 1756 - protein, 5 aa, synthetic construct
QSKQT

SEQ ID NO: 1757 - protein, 5 aa, synthetic construct
QNPLT

SEQ ID NO: 1758 - protein, 5 aa, synthetic construct
RDQKT

SEQ ID NO: 1759 - protein, 5 aa, synthetic construct
HNQQN

SEQ ID NO: 1760 - protein, 5 aa, synthetic construct
QWKRT

SEQ ID NO: 1761 - protein, 5 aa, synthetic construct
QNHQI

SEQ ID NO: 1762 - protein, 5 aa, synthetic construct
QNQQA

SEQ ID NO: 1763 - protein, 5 aa, synthetic construct
QNQLN

SEQ ID NO: 1764 - protein, 5 aa, synthetic construct
QTQPT

SEQ ID NO: 1765 - protein, 5 aa, synthetic construct
QKQLT

SEQ ID NO: 1766 - protein, 5 aa, synthetic construct
RNQLA

SEQ ID NO: 1767 - protein, 5 aa, synthetic construct
RNQQS

SEQ ID NO: 1768 - protein, 5 aa, synthetic construct
ISIQT

SEQ ID NO: 1769 - protein, 5 aa, synthetic construct
QNQQN

SEQ ID NO: 1770 - protein, 5 aa, synthetic construct
QSQQS

SEQ ID NO: 1771 - protein, 5 aa, synthetic construct
QTVCT

SEQ ID NO: 1772 - protein, 5 aa, synthetic construct
QYQQI

SEQ ID NO: 1773 - protein, 5 aa, synthetic construct
QQIMT

SEQ ID NO: 1774 - protein, 5 aa, synthetic construct
QNEQS

SEQ ID NO: 1775 - protein, 5 aa, synthetic construct
LNHQT

SEQ ID NO: 1776 - protein, 5 aa, synthetic construct
QMIHT

SEQ ID NO: 1777 - protein, 5 aa, synthetic construct
RNHQS

SEQ ID NO: 1778 - protein, 5 aa, synthetic construct
QKMNT

SEQ ID NO: 1779 - protein, 5 aa, synthetic construct
QSQQN

SEQ ID NO: 1780 - protein, 4 aa, synthetic construct
KSIY

SEQ ID NO: 1781 - protein, 4 aa, synthetic construct
KIIN

SEQ ID NO: 1782 - protein, 4 aa, synthetic construct
KAII

SEQ ID NO: 1783 - protein, 4 aa, synthetic construct
KAIS

SEQ ID NO: 1784 - protein, 4 aa, synthetic construct
KTVD

SEQ ID NO: 1785 - protein, 4 aa, synthetic construct
KTIE

SEQ ID NO: 1786 - protein, 4 aa, synthetic construct
KTIY

SEQ ID NO: 1787 - protein, 4 aa, synthetic construct
KNVV

SEQ ID NO: 1788 - protein, 4 aa, synthetic construct
KTDA

SEQ ID NO: 1789 - protein, 4 aa, synthetic construct
KTEM

SEQ ID NO: 1790 - protein, 4 aa, synthetic construct
KIVN

SEQ ID NO: 1791 - protein, 4 aa, synthetic construct
KIGN

SEQ ID NO: 1792 - protein, 4 aa, synthetic construct
KEVM

SEQ ID NO: 1793 - protein, 4 aa, synthetic construct
KYQV

SEQ ID NO: 1794 - protein, 4 aa, synthetic construct
KTVE

SEQ ID NO: 1795 - protein, 4 aa, synthetic construct
KAID

SEQ ID NO: 1796 - protein, 4 aa, synthetic construct
KTIM

SEQ ID NO: 1797 - protein, 4 aa, synthetic construct
KEVG

SEQ ID NO: 1798 - protein, 4 aa, synthetic construct
KSEM

SEQ ID NO: 1799 - protein, 4 aa, synthetic construct
KAQQ

SEQ ID NO: 1800 - protein, 13 aa, synthetic construct
GHDSPHKSGQNQQ

SEQ ID NO: 1801 - protein, 13 aa, synthetic construct
GSGSPHSKAQNQQ

SEQ ID NO: 1802 - protein, 13 aa, synthetic construct
GSGSPHSKAQNRH

SEQ ID NO: 1803 - protein, 13 aa, synthetic construct
GSGSPHSKVQNQQ

SEQ ID NO: 1804 - protein, 13 aa, synthetic construct
MSGSPHSKAQNQQ

SEQ ID NO: 1805 - protein, 13 aa, synthetic construct
GRGSPHSKAQNQQ

SEQ ID NO: 1806 - protein, 13 aa, synthetic construct
RNGSPHSKAQNQQ

SEQ ID NO: 1807 - protein, 13 aa, synthetic construct
GSGSPHSKARDQQ

SEQ ID NO: 1808 - protein, 13 aa, synthetic construct
GSGSPHSKAPNLQ

SEQ ID NO: 1809 - protein, 13 aa, synthetic construct
TSGSPHSKAQNQQ

SEQ ID NO: 1810 - protein, 13 aa, synthetic construct
GSGSPHSKAHVRQ

SEQ ID NO: 1811 - protein, 13 aa, synthetic construct
GSGSPHSKAPNQH

SEQ ID NO: 1812 - protein, 13 aa, synthetic construct
ISGSPHSKAQNQQ

SEQ ID NO: 1813 - protein, 13 aa, synthetic construct
GPGSPHSKAHNQQ

SEQ ID NO: 1814 - protein, 13 aa, synthetic construct
GSGSPHSKTQSQQ

SEQ ID NO: 1815 - protein, 13 aa, synthetic construct
ESGSPHSKAQNQQ

SEQ ID NO: 1816 - protein, 13 aa, synthetic construct
GSGSPHSKAQPAK

SEQ ID NO: 1817 - protein, 13 aa, synthetic construct
SSGSPHSKAQNQQ

SEQ ID NO: 1818 - protein, 13 aa, synthetic construct
GNGSPHSKAQNQQ

SEQ ID NO: 1819 - protein, 13 aa, synthetic construct
GSGSPHSKSQTQQ

SEQ ID NO: 1820 - protein, 13 aa, synthetic construct
ASGSPHSKAQNQQ

SEQ ID NO: 1821 - protein, 13 aa, synthetic construct
GSGSPHSKAQNLA

SEQ ID NO: 1822 - protein, 13 aa, synthetic construct
GSGSPHSKSQNQL

SEQ ID NO: 1823 - protein, 13 aa, synthetic construct
NSGSPHSKAQNQQ

SEQ ID NO: 1824 - protein, 13 aa, synthetic construct
GSGSPHSKAQGQQ

SEQ ID NO: 1825 - protein, 13 aa, synthetic construct
VSGSPHSKAQNQQ

SEQ ID NO: 1826 - protein, 13 aa, synthetic construct
GSGSPHSKALNRQ

SEQ ID NO: 1827 - protein, 13 aa, synthetic construct
LSGSPHSKAQNQQ

SEQ ID NO: 1828 - protein, 13 aa, synthetic construct
GSGSPHSKAHNQQ

SEQ ID NO: 1829 - protein, 13 aa, synthetic construct
GSGSPHSKTQNQQ

SEQ ID NO: 1830 - protein, 13 aa, synthetic construct
GGGSPHSKAQTQQ

SEQ ID NO: 1831 - protein, 13 aa, synthetic construct
GSGSPHSKAQNPP

SEQ ID NO: 1832 - protein, 13 aa, synthetic construct
GSGSPHSKAQNLQ

SEQ ID NO: 1833 - protein, 13 aa, synthetic construct
GGGSPHSKAQNQQ

SEQ ID NO: 1834 - protein, 13 aa, synthetic construct
GSGSPHSKAQYQQ

SEQ ID NO: 1835 - protein, 13 aa, synthetic construct
GGGSPHSKAQNKQ

SEQ ID NO: 1836 - protein, 13 aa, synthetic construct
GSGSPHSKAQDQE

SEQ ID NO: 1837 - protein, 13 aa, synthetic construct
KSGSPHSKAQNQQ

SEQ ID NO: 1838 - protein, 13 aa, synthetic construct
GGGSPHSKAQNQL

SEQ ID NO: 1839 - protein, 13 aa, synthetic construct
GSGSPHSKAQNHQ

SEQ ID NO: 1840 - protein, 13 aa, synthetic construct
GSGSPHSKAQDQQ

SEQ ID NO: 1841 - protein, 13 aa, synthetic construct
GGGSPHSKSQNQL

SEQ ID NO: 1842 - protein, 13 aa, synthetic construct
GNGSPHSKAQNKQ

SEQ ID NO: 1843 - protein, 13 aa, synthetic construct
GSGSPHSKGHWQQ

SEQ ID NO: 1844 - protein, 13 aa, synthetic construct
GSGSPHSKAPNQQ

SEQ ID NO: 1845 - protein, 13 aa, synthetic construct
GSGSPHSKAQNQL

SEQ ID NO: 1846 - protein, 13 aa, synthetic construct
GSGSPHSKRPEQQ

SEQ ID NO: 1847 - protein, 13 aa, synthetic construct
GSGSPHSKAQRTM

SEQ ID NO: 1848 - protein, 13 aa, synthetic construct
GNGSPHSKAQNQH

SEQ ID NO: 1849 - protein, 13 aa, synthetic construct
HSGSPHSKAQNQQ

SEQ ID NO: 1850 - protein, 13 aa, synthetic construct
GGGSPHSKALNQQ

SEQ ID NO: 1851 - protein, 13 aa, synthetic construct
GSGSPHSKALHQH

SEQ ID NO: 1852 - protein, 13 aa, synthetic construct
GTGSPHSKAQNHQ

SEQ ID NO: 1853 - protein, 13 aa, synthetic construct
GSGSPHSKAQHRI

SEQ ID NO: 1854 - protein, 13 aa, synthetic construct
GSGSPHSKAQYIH

SEQ ID NO: 1855 - protein, 13 aa, synthetic construct
GGGSPHSKAHNQQ

SEQ ID NO: 1856 - protein, 13 aa, synthetic construct
GSGSPHSKAQKFE

SEQ ID NO: 1857 - protein, 13 aa, synthetic construct
ESGSPHSKAQNHQ

SEQ ID NO: 1858 - protein, 13 aa, synthetic construct
GSGSPHSKAQFPS

SEQ ID NO: 1859 - protein, 13 aa, synthetic construct
PSGSPHSKAQNQQ

SEQ ID NO: 1860 - protein, 13 aa, synthetic construct
GNGSPHSKAQNPL

SEQ ID NO: 1861 - protein, 13 aa, synthetic construct
GGGSPHSKAQSQQ

SEQ ID NO: 1862 - protein, 13 aa, synthetic construct
GSGSPHSKAQAIK

SEQ ID NO: 1863 - protein, 13 aa, synthetic construct
GSGSPHSKGQNRQ

SEQ ID NO: 1864 - protein, 13 aa, synthetic construct
GSGSPHSKAQSQQ

SEQ ID NO: 1865 - protein, 13 aa, synthetic construct
GSVSPHGKAQNQL

SEQ ID NO: 1866 - protein, 13 aa, synthetic construct
ASGSPHSKAQNQL

SEQ ID NO: 1867 - protein, 13 aa, synthetic construct
RSGSPHSKAQNQQ

SEQ ID NO: 1868 - protein, 13 aa, synthetic construct
GSGSPHSKAQYQH

SEQ ID NO: 1869 - protein, 13 aa, synthetic construct
GSGSPHTKAQNPQ

SEQ ID NO: 1870 - protein, 13 aa, synthetic construct
GSGSPHSKGQNPP

SEQ ID NO: 1871 - protein, 13 aa, synthetic construct
GSGSPHSKAQHQL

SEQ ID NO: 1872 - protein, 13 aa, synthetic construct
GSGSPHSKAQSPP

SEQ ID NO: 1873 - protein, 13 aa, synthetic construct
GSGSPHSKAQAKL

SEQ ID NO: 1874 - protein, 13 aa, synthetic construct
GSGSPHSKTKSQQ

SEQ ID NO: 1875 - protein, 13 aa, synthetic construct
GSGSPHSKAQDRP

SEQ ID NO: 1876 - protein, 13 aa, synthetic construct
GIGSPHSKAQNLG

SEQ ID NO: 1877 - protein, 13 aa, synthetic construct
GSGSPHSKAQAFH

SEQ ID NO: 1878 - protein, 13 aa, synthetic construct
GSGSPHSKAQKQQ

SEQ ID NO: 1879 - protein, 13 aa, synthetic construct
GSGSPHSKAQNAQ

SEQ ID NO: 1880 - protein, 13 aa, synthetic construct
WSGSPHSKAQNQQ

SEQ ID NO: 1881 - protein, 13 aa, synthetic construct
GSGSPHSKAHNQL

SEQ ID NO: 1882 - protein, 13 aa, synthetic construct
GNGSPHSKAQNHQ

SEQ ID NO: 1883 - protein, 13 aa, synthetic construct
GGGSPHSKAQNLQ

SEQ ID NO: 1884 - protein, 13 aa, synthetic construct
GSGSPHSKAQKLN

SEQ ID NO: 1885 - protein, 13 aa, synthetic construct
GGGSPHSKSQNQH

SEQ ID NO: 1886 - protein, 13 aa, synthetic construct
GSGSPHSKSQNVQ

SEQ ID NO: 1887 - protein, 13 aa, synthetic construct
GSGSPHSKAQAQQ

SEQ ID NO: 1888 - protein, 13 aa, synthetic construct
DSGSPHSKAQNQQ

SEQ ID NO: 1889 - protein, 13 aa, synthetic construct
ASGSPHSKAPNQQ

SEQ ID NO: 1890 - protein, 13 aa, synthetic construct
GSGSPHSKAQTPP

SEQ ID NO: 1891 - protein, 13 aa, synthetic construct
IDGSPHSKAQNQQ

SEQ ID NO: 1892 - protein, 13 aa, synthetic construct
GSGSPHNKAQNHQ

SEQ ID NO: 1893 - protein, 13 aa, synthetic construct
GSGSPHSKAQPPA

SEQ ID NO: 1894 - protein, 13 aa, synthetic construct
GSGSPHSKAQERP

SEQ ID NO: 1895 - protein, 13 aa, synthetic construct
GSGSPHSKAQDLQ

SEQ ID NO: 1896 - protein, 13 aa, synthetic construct
GGGSPHSKAQNPP

SEQ ID NO: 1897 - protein, 13 aa, synthetic construct
GSGSPHSKAQAMH

SEQ ID NO: 1898 - protein, 13 aa, synthetic construct
GSGSPHSKALNQQ

SEQ ID NO: 1899 - protein, 13 aa, synthetic construct
GSGSPHSKAQHPS

SEQ ID NO: 1900 - protein, 13 aa, synthetic construct
GLGSPHSKSQNQQ

SEQ ID NO: 1901 - protein, 13 aa, synthetic construct
GTGSPHSKAQNQQ

SEQ ID NO: 1902 - protein, 13 aa, synthetic construct
GSGSPHSKAPGLQ

SEQ ID NO: 1903 - protein, 13 aa, synthetic construct
GSGSPHSKAQGIR

SEQ ID NO: 1904 - protein, 13 aa, synthetic construct
GSGSPHSKAQAPA

SEQ ID NO: 1905 - protein, 13 aa, synthetic construct
GSGSPHSKSQSQQ

SEQ ID NO: 1906 - protein, 13 aa, synthetic construct
GSGSPHSKAQIPP

SEQ ID NO: 1907 - protein, 13 aa, synthetic construct
GSGSPHSKAQTQL

SEQ ID NO: 1908 - protein, 13 aa, synthetic construct
GSGSPHSKAQAPS

SEQ ID NO: 1909 - protein, 13 aa, synthetic construct
DAGSPHSKAQNQQ

SEQ ID NO: 1910 - protein, 13 aa, synthetic construct
GSGSPHSKGQNQQ

SEQ ID NO: 1911 - protein, 13 aa, synthetic construct
DGGSPHSKAQNQQ

SEQ ID NO: 1912 - protein, 13 aa, synthetic construct
ASGSPHSKAHNQQ

SEQ ID NO: 1913 - protein, 13 aa, synthetic construct
GSGSPHSKAQNTY

SEQ ID NO: 1914 - protein, 13 aa, synthetic construct
GSGSPHSKSQNQH

SEQ ID NO: 1915 - protein, 13 aa, synthetic construct
GGGSPHSKAQDKQ

SEQ ID NO: 1916 - protein, 13 aa, synthetic construct
GSGSPHSKAQNHL

SEQ ID NO: 1917 - protein, 13 aa, synthetic construct
GSGSPHSKAQIGM

SEQ ID NO: 1918 - protein, 13 aa, synthetic construct
GSGSPHSKALNKQ

SEQ ID NO: 1919 - protein, 13 aa, synthetic construct
GGGSPHSKAQNPQ

SEQ ID NO: 1920 - protein, 13 aa, synthetic construct
GTGSPHSKAPNQL

SEQ ID NO: 1921 - protein, 13 aa, synthetic construct
GSGSPHSKAQLQQ

SEQ ID NO: 1922 - protein, 13 aa, synthetic construct
GGGSPHSKAQYQQ

SEQ ID NO: 1923 - protein, 13 aa, synthetic construct
GGGSPHSKAQHQQ

SEQ ID NO: 1924 - protein, 13 aa, synthetic construct
GSGSPHSKAQRMS

SEQ ID NO: 1925 - protein, 13 aa, synthetic construct
GSGSPHSKAQGIL

SEQ ID NO: 1926 - protein, 13 aa, synthetic construct
GSGSPHSKAQDRQ

SEQ ID NO: 1927 - protein, 13 aa, synthetic construct
GSGSPHSKARDWQ

SEQ ID NO: 1928 - protein, 13 aa, synthetic construct
GSGSPHSKAQNTH

SEQ ID NO: 1929 - protein, 13 aa, synthetic construct
GSGSPHSKAQERS

SEQ ID NO: 1930 - protein, 13 aa, synthetic construct
GSGSPHSKAQNYQ

SEQ ID NO: 1931 - protein, 13 aa, synthetic construct
GSGSPHSKAQRTC

SEQ ID NO: 1932 - protein, 13 aa, synthetic construct
GSGSPHSKAQIGH

SEQ ID NO: 1933 - protein, 13 aa, synthetic construct
GSGSPHSKAQGAI

SEQ ID NO: 1934 - protein, 13 aa, synthetic construct
GSGSPHSKAQVPP

SEQ ID NO: 1935 - protein, 13 aa, synthetic construct
GSGSPHSKAQVQQ

SEQ ID NO: 1936 - protein, 13 aa, synthetic construct
GSGSPHSKALMRQ

SEQ ID NO: 1937 - protein, 13 aa, synthetic construct
GSGSPHSKAQYSV

SEQ ID NO: 1938 - protein, 13 aa, synthetic construct
GSGSPHSKVPNLQ

SEQ ID NO: 1939 - protein, 13 aa, synthetic construct
GSGSPHSKAQAIT

SEQ ID NO: 1940 - protein, 13 aa, synthetic construct
GSGSPHSKAQKTL

SEQ ID NO: 1941 - protein, 13 aa, synthetic construct
GSGSPHSKAQNQW

SEQ ID NO: 1942 - protein, 13 aa, synthetic construct
GSGSPHSKAQLHH

SEQ ID NO: 1943 - protein, 13 aa, synthetic construct
GSGSPHSKAQNII

SEQ ID NO: 1944 - protein, 13 aa, synthetic construct
MEGSPHSKAQNQQ

SEQ ID NO: 1945 - protein, 13 aa, synthetic construct
GSGSPHSKAQGHH

SEQ ID NO: 1946 - protein, 13 aa, synthetic construct
GSGSPHSKAQSKV

SEQ ID NO: 1947 - protein, 13 aa, synthetic construct
GSGSPHSKAQLPS

SEQ ID NO: 1948 - protein, 13 aa, synthetic construct
GSGSPHSKAIGKQ

SEQ ID NO: 1949 - protein, 13 aa, synthetic construct
GGGSPHSKSQNQQ

SEQ ID NO: 1950 - protein, 13 aa, synthetic construct
GSGSPHSKAQAIH

SEQ ID NO: 1951 - protein, 13 aa, synthetic construct
GSGSPHSKAQHGL

SEQ ID NO: 1952 - protein, 13 aa, synthetic construct
GSGSPHSKAQFMC

SEQ ID NO: 1953 - protein, 13 aa, synthetic construct
VSGSPHSKAQGQQ

SEQ ID NO: 1954 - protein, 13 aa, synthetic construct
GGGSPHSKAQNQM

SEQ ID NO: 1955 - protein, 13 aa, synthetic construct
GSGSPHSKAQHLQ

SEQ ID NO: 1956 - protein, 13 aa, synthetic construct
ENGSPHSKAQNQQ

SEQ ID NO: 1957 - protein, 13 aa, synthetic construct
GSGSPHSKTQNHQ

SEQ ID NO: 1958 - protein, 13 aa, synthetic construct
GSGSPHSKAQPAR

SEQ ID NO: 1959 - protein, 13 aa, synthetic construct
GSGSPHSKAQSLQ

SEQ ID NO: 1960 - protein, 13 aa, synthetic construct
GSGSPHSKSQSQL

SEQ ID NO: 1961 - protein, 13 aa, synthetic construct
GSASPHSKAHSQQ

SEQ ID NO: 1962 - protein, 13 aa, synthetic construct
GSGSPHSKAQMPS

SEQ ID NO: 1963 - protein, 13 aa, synthetic construct
GSGSPHSKAQGSL

SEQ ID NO: 1964 - protein, 13 aa, synthetic construct
GSGSPHSKSQNQQ

SEQ ID NO: 1965 - protein, 13 aa, synthetic construct
GNGSPHSKSQNQQ

SEQ ID NO: 1966 - protein, 13 aa, synthetic construct
GSGSPHSKAQVPA

SEQ ID NO: 1967 - protein, 13 aa, synthetic construct
GNGSPHSKAQNLQ

SEQ ID NO: 1968 - protein, 13 aa, synthetic construct
GSGSPHSKAQDKQ

SEQ ID NO: 1969 - protein, 13 aa, synthetic construct
GSGSPHSKAHYQQ

SEQ ID NO: 1970 - protein, 13 aa, synthetic construct
GSGSPHSKAQVPS

SEQ ID NO: 1971 - protein, 13 aa, synthetic construct
GGGSPHSKAQNHQ

SEQ ID NO: 1972 - protein, 13 aa, synthetic construct
GSGSPHSKARGEQ

SEQ ID NO: 1973 - protein, 13 aa, synthetic construct
GGGSPHSKAQYQH

SEQ ID NO: 1974 - protein, 13 aa, synthetic construct
GSGSPHSKAPGQQ

SEQ ID NO: 1975 - protein, 13 aa, synthetic construct
KNGSPHSKAQNQQ

SEQ ID NO: 1976 - protein, 13 aa, synthetic construct
GSGSPHSKRLEQQ

SEQ ID NO: 1977 - protein, 13 aa, synthetic construct
GSGSPHSKAQNQS

SEQ ID NO: 1978 - protein, 13 aa, synthetic construct
GSGSPHSKAQKVI

SEQ ID NO: 1979 - protein, 13 aa, synthetic construct
GSGSPHSKAQNND

SEQ ID NO: 1980 - protein, 13 aa, synthetic construct
GSGSPHSKAQSVH

SEQ ID NO: 1981 - protein, 13 aa, synthetic construct
GSGSPHSKAQPLG

SEQ ID NO: 1982 - protein, 13 aa, synthetic construct
KEGSPHSKAQNQQ

SEQ ID NO: 1983 - protein, 13 aa, synthetic construct
GSGSPHSKAHNQE

SEQ ID NO: 1984 - protein, 13 aa, synthetic construct
GSGSPHSKAQIQQ

SEQ ID NO: 1985 - protein, 13 aa, synthetic construct
GSGSPHSKAQVRN

SEQ ID NO: 1986 - protein, 13 aa, synthetic construct
GSGSPHSKAPSNQ

SEQ ID NO: 1987 - protein, 13 aa, synthetic construct
GSGSPHSKAQVGH

SEQ ID NO: 1988 - protein, 13 aa, synthetic construct
GSGSPHSKAQRDI

SEQ ID NO: 1989 - protein, 13 aa, synthetic construct
GSGSPHSKAQMPN

SEQ ID NO: 1990 - protein, 13 aa, synthetic construct
AIGSPHSKAQNQQ

SEQ ID NO: 1991 - protein, 13 aa, synthetic construct
GSGSPHSKARGLQ

SEQ ID NO: 1992 - protein, 13 aa, synthetic construct
GSGSPHSKLQKQQ

SEQ ID NO: 1993 - protein, 13 aa, synthetic construct
GSGSPHSKAPSLQ

SEQ ID NO: 1994 - protein, 13 aa, synthetic construct
GSGSPHSKAQRDQ

SEQ ID NO: 1995 - protein, 13 aa, synthetic construct
GSGSPHSKNRDQQ

SEQ ID NO: 1996 - protein, 13 aa, synthetic construct
GSGSPHSKAQAKG

SEQ ID NO: 1997 - protein, 13 aa, synthetic construct
GSGSPHSKAQSAH

SEQ ID NO: 1998 - protein, 13 aa, synthetic construct
GNGSPHSKSQNQH

SEQ ID NO: 1999 - protein, 13 aa, synthetic construct
GSGSPHSKSQNHQ

SEQ ID NO: 2000 - protein, 13 aa, synthetic construct
RSGSPHSKAQDQQ

SEQ ID NO: 2001 - protein, 13 aa, synthetic construct
GSGSPHSKAQSTM

SEQ ID NO: 2002 - protein, 13 aa, synthetic construct
GSGSPHSKAQREM

SEQ ID NO: 2003 - protein, 13 aa, synthetic construct
GGGSPHSKSQNRQ

SEQ ID NO: 2004 - protein, 13 aa, synthetic construct
GSGSPHSKAQYRA

SEQ ID NO: 2005 - protein, 13 aa, synthetic construct
GGGSPHSKAQRQQ

SEQ ID NO: 2006 - protein, 13 aa, synthetic construct
GSGSPHSKNQWQQ

SEQ ID NO: 2007 - protein, 13 aa, synthetic construct
GSGSPHSKAQRMN

SEQ ID NO: 2008 - protein, 13 aa, synthetic construct
GSGSPHAKAQNHQ

SEQ ID NO: 2009 - protein, 13 aa, synthetic construct
GSGSPHSKAGDSQ

SEQ ID NO: 2010 - protein, 13 aa, synthetic construct
GSGSPHSKLKSQQ

SEQ ID NO: 2011 - protein, 13 aa, synthetic construct
GSGSPHSKAQKIS

SEQ ID NO: 2012 - protein, 13 aa, synthetic construct
GSGSPHSKAPSMQ

SEQ ID NO: 2013 - protein, 13 aa, synthetic construct
GSGSPHSKASPRQ

SEQ ID NO: 2014 - protein, 13 aa, synthetic construct
GSGSPHSKRMEQQ

SEQ ID NO: 2015 - protein, 13 aa, synthetic construct
GSGSPHSKAQYQN

SEQ ID NO: 2016 - protein, 13 aa, synthetic construct
GSGSPHARMQNQQ

SEQ ID NO: 2017 - protein, 13 aa, synthetic construct
GSGSPHVKSQNQQ

SEQ ID NO: 2018 - protein, 13 aa, synthetic construct
GQDSPHKSGQNQQ

SEQ ID NO: 2019 - protein, 13 aa, synthetic construct
GSGSPHASRQNQQ

SEQ ID NO: 2020 - protein, 13 aa, synthetic construct
GSGSPHASRQNKQ

SEQ ID NO: 2021 - protein, 13 aa, synthetic construct
GSGSPHVKIQNQQ

SEQ ID NO: 2022 - protein, 13 aa, synthetic construct
GSGSPHSKAKNQQ

SEQ ID NO: 2023 - protein, 13 aa, synthetic construct
GSGSPHKKNQNQQ

SEQ ID NO: 2024 - protein, 13 aa, synthetic construct
GSGSPHVRMQNQQ

SEQ ID NO: 2025 - protein, 13 aa, synthetic construct
GSGSPHASRQKQQ

SEQ ID NO: 2026 - protein, 13 aa, synthetic construct
GHSSPHRSGQNQQ

SEQ ID NO: 2027 - protein, 13 aa, synthetic construct
GSGSPHTRGQNQQ

SEQ ID NO: 2028 - protein, 13 aa, synthetic construct
CSGSPHSKAQNQQ

SEQ ID NO: 2029 - protein, 13 aa, synthetic construct
GSGSPHRKAQNQQ

SEQ ID NO: 2030 - protein, 13 aa, synthetic construct
GSGSPHSKAQNKQ

SEQ ID NO: 2031 - protein, 13 aa, synthetic construct
GSGSPHSKAQTQQ

SEQ ID NO: 2032 - protein, 13 aa, synthetic construct
CSGSPHKTSQNQQ

SEQ ID NO: 2033 - protein, 13 aa, synthetic construct
CSHSPHKSGQNQQ

SEQ ID NO: 2034 - protein, 13 aa, synthetic construct
GQSSPHRSGQNQQ

SEQ ID NO: 2035 - protein, 13 aa, synthetic construct
GRGSPHASRQNQQ

SEQ ID NO: 2036 - protein, 13 aa, synthetic construct
GSGSPHASRKNQQ

SEQ ID NO: 2037 - protein, 13 aa, synthetic construct
GSGSPHASRQNQH

SEQ ID NO: 2038 - protein, 13 aa, synthetic construct
GSGSPHKFGKNQQ

SEQ ID NO: 2039 - protein, 13 aa, synthetic construct
GSGSPHKFGQKQQ

SEQ ID NO: 2040 - protein, 13 aa, synthetic construct
GSGSPHKFGQNQQ

SEQ ID NO: 2041 - protein, 13 aa, synthetic construct
GSGSPHKIGQNQQ

SEQ ID NO: 2042 - protein, 13 aa, synthetic construct
GSGSPHKLGQNQQ

SEQ ID NO: 2043 - protein, 13 aa, synthetic construct
GSGSPHKTSKNQQ

SEQ ID NO: 2044 - protein, 13 aa, synthetic construct
GSGSPHKTSQKQQ

SEQ ID NO: 2045 - protein, 13 aa, synthetic construct
GSGSPHKTSQNQQ

SEQ ID NO: 2046 - protein, 13 aa, synthetic construct
GSGSPHKTTQNQQ

SEQ ID NO: 2047 - protein, 13 aa, synthetic construct
GSGSPHKTYQNQQ

SEQ ID NO: 2048 - protein, 13 aa, synthetic construct
GSGSPHKYGQNQQ

SEQ ID NO: 2049 - protein, 13 aa, synthetic construct
GSGSPHSKAQHQQ

SEQ ID NO: 2050 - protein, 13 aa, synthetic construct
GSGSPHSKDQNQQ

SEQ ID NO: 2051 - protein, 13 aa, synthetic construct
GSGSPHSKPQNQQ

SEQ ID NO: 2052 - protein, 13 aa, synthetic construct
GSGSPHVRGQKQQ

SEQ ID NO: 2053 - protein, 13 aa, synthetic construct
GSGSPHVRGQNKQ

SEQ ID NO: 2054 - protein, 13 aa, synthetic construct
GSHSPHKRGQNQQ

SEQ ID NO: 2055 - protein, 13 aa, synthetic construct
GSHSPHKSGQKQQ

SEQ ID NO: 2056 - protein, 13 aa, synthetic construct
GSHSPHKSGQNQQ

SEQ ID NO: 2057 - protein, 13 aa, synthetic construct
VSGSPHASRQNQQ

SEQ ID NO: 2058 - protein, 13 aa, synthetic construct
VSGSPHGARQNQQ

SEQ ID NO: 2059 - protein, 13 aa, synthetic construct
VSGSPHKFGQNQQ

SEQ ID NO: 2060 - protein, 13 aa, synthetic construct
GSGSPHSKAQYYV

SEQ ID NO: 2061 - protein, 13 aa, synthetic construct
GSGSPHSKLRRQQ

SEQ ID NO: 2062 - protein, 13 aa, synthetic construct
GSGSPHSKAGCGQ

SEQ ID NO: 2063 - protein, 13 aa, synthetic construct
GSGSPHSRAQNQQ

SEQ ID NO: 2064 - protein, 13 aa, synthetic construct
GSGSPHSKRLRQQ

SEQ ID NO: 2065 - protein, 13 aa, synthetic construct
GSGSPHSLRRNQQ

SEQ ID NO: 2066 - protein, 13 aa, synthetic construct
GSGSPHSRGRNQQ

SEQ ID NO: 2067 - protein, 13 aa, synthetic construct
GSGSPHSSRRNQQ

SEQ ID NO: 2068 - protein, 13 aa, synthetic construct
GSGSPHSKAFRLQ

SEQ ID NO: 2069 - protein, 13 aa, synthetic construct
GSCSPHRKAQNQQ

SEQ ID NO: 2070 - protein, 13 aa, synthetic construct
GSGSPHFLRQNQQ

SEQ ID NO: 2071 - protein, 13 aa, synthetic construct
GSGSPHSLRFNQQ

SEQ ID NO: 2072 - protein, 13 aa, synthetic construct
GSGSPHSKWLLQQ

SEQ ID NO: 2073 - protein, 13 aa, synthetic construct
GSGSPHSKRRLQQ

SEQ ID NO: 2074 - protein, 13 aa, synthetic construct
GSGSPHSKAQRKL

SEQ ID NO: 2075 - protein, 13 aa, synthetic construct
GSGSPHSKALRRQ

SEQ ID NO: 2076 - protein, 13 aa, synthetic construct
GSGSPHSKAQRLR

SEQ ID NO: 2077 - protein, 13 aa, synthetic construct
GSGSPHSKAQRRL

SEQ ID NO: 2078 - protein, 13 aa, synthetic construct
GSGSPHSKARRQQ

SEQ ID NO: 2079 - protein, 13 aa, synthetic construct
GSGSPHSKARRLQ

SEQ ID NO: 2080 - protein, 13 aa, synthetic construct
GSGSPHSKSRRQQ

SEQ ID NO: 2081 - protein, 13 aa, synthetic construct
GLLSPHWKAQNQQ

SEQ ID NO: 2082 - protein, 13 aa, synthetic construct
GSGSPHSKARLRQ

SEQ ID NO: 2083 - protein, 13 aa, synthetic construct
GSGSPHSKASKRQ

SEQ ID NO: 2084 - protein, 13 aa, synthetic construct
GSGSPHVRRQNQQ

SEQ ID NO: 2085 - protein, 13 aa, synthetic construct
GSGSPHSKAQLYR

SEQ ID NO: 2086 - protein, 13 aa, synthetic construct
GSGSPHSKAQLTV

SEQ ID NO: 2087 - protein, 13 aa, synthetic construct
GHDSPHKRGQHRQ

SEQ ID NO: 2088 - protein, 13 aa, synthetic construct
GHDSPHKSGQKQQ

SEQ ID NO: 2089 - protein, 13 aa, synthetic construct
GHDSPHKSGLTQQ

SEQ ID NO: 2090 - protein, 13 aa, synthetic construct
GDDSPHKSGRNQQ

SEQ ID NO: 2091 - protein, 13 aa, synthetic construct
GHDSPHKSGLNQQ

SEQ ID NO: 2092 - protein, 13 aa, synthetic construct
GHESPHKSAQNHQ

SEQ ID NO: 2093 - protein, 13 aa, synthetic construct
GHDSPHKSAQNQW

SEQ ID NO: 2094 - protein, 13 aa, synthetic construct
GHDSPHKSGQNTH

SEQ ID NO: 2095 - protein, 13 aa, synthetic construct
GHDSPHKSGRRRQ

SEQ ID NO: 2096 - protein, 13 aa, synthetic construct
GHDSPHKSAQNQQ

SEQ ID NO: 2097 - protein, 13 aa, synthetic construct
GHDSPHKSGQYQQ

SEQ ID NO: 2098 - protein, 13 aa, synthetic construct
GNYSPHKIGQNQQ

SEQ ID NO: 2099 - protein, 13 aa, synthetic construct
GHDSPHKSRQNDQ

SEQ ID NO: 2100 - protein, 13 aa, synthetic construct
GHDSPHKSGQIRQ

SEQ ID NO: 2101 - protein, 13 aa, synthetic construct
GHDSPHKIGQNQH

SEQ ID NO: 2102 - protein, 13 aa, synthetic construct
GYDSPHKSGQKQQ

SEQ ID NO: 2103 - protein, 13 aa, synthetic construct
GHDSPHKSGQSVQ

SEQ ID NO: 2104 - protein, 13 aa, synthetic construct
GHESPHKSGRSQQ

SEQ ID NO: 2105 - protein, 13 aa, synthetic construct
GHDSPHKSGQNKL

SEQ ID NO: 2106 - protein, 13 aa, synthetic construct
GHDSPHKTGQNQQ

SEQ ID NO: 2107 - protein, 13 aa, synthetic construct
GRGSPHKRGQNQQ

SEQ ID NO: 2108 - protein, 13 aa, synthetic construct
GSGSPHTKAQNPP

SEQ ID NO: 2109 - protein, 13 aa, synthetic construct
GQDSPHKSGQHQQ

SEQ ID NO: 2110 - protein, 13 aa, synthetic construct
GHDSPHKSGQIQH

SEQ ID NO: 2111 - protein, 13 aa, synthetic construct
GHDSPHKSGPRQQ

SEQ ID NO: 2112 - protein, 13 aa, synthetic construct
GHDSPHKSGHTQQ

SEQ ID NO: 2113 - protein, 13 aa, synthetic construct
GHDSPHKSGQRQH

SEQ ID NO: 2114 - protein, 13 aa, synthetic construct
GSGSPHTKAQNQQ

SEQ ID NO: 2115 - protein, 13 aa, synthetic construct
GHDSPHKSAQSQQ

SEQ ID NO: 2116 - protein, 13 aa, synthetic construct
GHESPHKSGQNQQ

SEQ ID NO: 2117 - protein, 13 aa, synthetic construct
GHDSPHKSLQNQQ

SEQ ID NO: 2118 - protein, 13 aa, synthetic construct
GHGSPHSKAQNPQ

SEQ ID NO: 2119 - protein, 13 aa, synthetic construct
GHDSPHKSGRNQE

SEQ ID NO: 2120 - protein, 13 aa, synthetic construct
GHDSPHKSGQTQL

SEQ ID NO: 2121 - protein, 13 aa, synthetic construct
GHDSPHKSEKNQQ

SEQ ID NO: 2122 - protein, 13 aa, synthetic construct
GRDSPHKSGQDQQ

SEQ ID NO: 2123 - protein, 13 aa, synthetic construct
GHDSPHKTGHNQQ

SEQ ID NO: 2124 - protein, 13 aa, synthetic construct
GYDSPHKSGQTQQ

SEQ ID NO: 2125 - protein, 13 aa, synthetic construct
GHESPHKSGQTQQ

SEQ ID NO: 2126 - protein, 13 aa, synthetic construct
GHDSPHKSGQSKQ

SEQ ID NO: 2127 - protein, 13 aa, synthetic construct
GHDSPHKTGQNQP

SEQ ID NO: 2128 - protein, 13 aa, synthetic construct
GHDSPHKSGQSPQ

SEQ ID NO: 2129 - protein, 13 aa, synthetic construct
GNDSPHKSVQNQQ

SEQ ID NO: 2130 - protein, 13 aa, synthetic construct
GHDSPHKSAQNYQ

SEQ ID NO: 2131 - protein, 13 aa, synthetic construct
GSASPHSKALNQQ

SEQ ID NO: 2132 - protein, 13 aa, synthetic construct
GHESPHKSAQNRQ

SEQ ID NO: 2133 - protein, 13 aa, synthetic construct
GQDSPHKIGQNQQ

SEQ ID NO: 2134 - protein, 13 aa, synthetic construct
GHDSPHKSGQNHL

SEQ ID NO: 2135 - protein, 13 aa, synthetic construct
GHDSPHKSGQYQH

SEQ ID NO: 2136 - protein, 13 aa, synthetic construct
GNDSPHKSVQNHQ

SEQ ID NO: 2137 - protein, 13 aa, synthetic construct
GHDSPHKSGQNQW

SEQ ID NO: 2138 - protein, 13 aa, synthetic construct
GHDSPHKSVQNQH

SEQ ID NO: 2139 - protein, 13 aa, synthetic construct
GHDSPHKSGQNQH

SEQ ID NO: 2140 - protein, 13 aa, synthetic construct
GHDSPHKSGQTRQ

SEQ ID NO: 2141 - protein, 13 aa, synthetic construct
GHDSPHKSGQNLH

SEQ ID NO: 2142 - protein, 13 aa, synthetic construct
GHDSPHKSAQNQE

SEQ ID NO: 2143 - protein, 13 aa, synthetic construct
GHDSPHKSGQHLQ

SEQ ID NO: 2144 - protein, 13 aa, synthetic construct
GHDSPHKSRLNQP

SEQ ID NO: 2145 - protein, 13 aa, synthetic construct
GQDSPHKSGQNQD

SEQ ID NO: 2146 - protein, 13 aa, synthetic construct
GHDSPHKSGRNQQ

SEQ ID NO: 2147 - protein, 13 aa, synthetic construct
GHDSPHKSGQNLL

SEQ ID NO: 2148 - protein, 13 aa, synthetic construct
GHDSPHKSGQLVI

SEQ ID NO: 2149 - protein, 13 aa, synthetic construct
GHDSPHKSRQSQQ

SEQ ID NO: 2150 - protein, 13 aa, synthetic construct
GHDSPHKSGRTQE

SEQ ID NO: 2151 - protein, 13 aa, synthetic construct
GHDSPHKSVQTHQ

SEQ ID NO: 2152 - protein, 13 aa, synthetic construct
GHDSPHKSGQNQP

SEQ ID NO: 2153 - protein, 13 aa, synthetic construct
GHDSPHKSGQTQQ

SEQ ID NO: 2154 - protein, 13 aa, synthetic construct
GPDSPHKIGQNQQ

SEQ ID NO: 2155 - protein, 13 aa, synthetic construct
GHDSPHKSVQNQQ

SEQ ID NO: 2156 - protein, 13 aa, synthetic construct
GHDSPHKSRQDQH

SEQ ID NO: 2157 - protein, 13 aa, synthetic construct
GPDSPHKSGQKQQ

SEQ ID NO: 2158 - protein, 13 aa, synthetic construct
GHDSPHKSRQSQH

SEQ ID NO: 2159 - protein, 13 aa, synthetic construct
GHDSPHKSVQNQL

SEQ ID NO: 2160 - protein, 13 aa, synthetic construct
GYDSPHKSGQYQH

SEQ ID NO: 2161 - protein, 13 aa, synthetic construct
GHDSPHKSRQNQQ

SEQ ID NO: 2162 - protein, 13 aa, synthetic construct
GHDSPHKSWVRQQ

SEQ ID NO: 2163 - protein, 13 aa, synthetic construct
GHESPHKSGQNQH

SEQ ID NO: 2164 - protein, 13 aa, synthetic construct
GHDSPHKIGHNQQ

SEQ ID NO: 2165 - protein, 13 aa, synthetic construct
GHDSPHKSNAWQQ

SEQ ID NO: 2166 - protein, 13 aa, synthetic construct
GHDSPHKSGQSVP

SEQ ID NO: 2167 - protein, 13 aa, synthetic construct
GHESPHKSGQNIQ

SEQ ID NO: 2168 - protein, 13 aa, synthetic construct
GHDSPHKSVQNHL

SEQ ID NO: 2169 - protein, 13 aa, synthetic construct
GHDSPHKIGLDQQ

SEQ ID NO: 2170 - protein, 13 aa, synthetic construct
ASGSPHSKAQHQQ

SEQ ID NO: 2171 - protein, 13 aa, synthetic construct
GHDSPHKRGPDQQ

SEQ ID NO: 2172 - protein, 13 aa, synthetic construct
GMGSPHSKTQNQQ

SEQ ID NO: 2173 - protein, 13 aa, synthetic construct
GHDSPHKSGESQQ

SEQ ID NO: 2174 - protein, 13 aa, synthetic construct
GHDSPHKHGQNHQ

SEQ ID NO: 2175 - protein, 13 aa, synthetic construct
GTGSPHSKAQNQL

SEQ ID NO: 2176 - protein, 13 aa, synthetic construct
GHDSPHKSVQNKQ

SEQ ID NO: 2177 - protein, 13 aa, synthetic construct
GQVSPHKSGQNQQ

SEQ ID NO: 2178 - protein, 13 aa, synthetic construct
GHDSPHKSGQRQL

SEQ ID NO: 2179 - protein, 13 aa, synthetic construct
GHDSPHKIGQNQL

SEQ ID NO: 2180 - protein, 13 aa, synthetic construct
GHDSPHKSGQIIV

SEQ ID NO: 2181 - protein, 13 aa, synthetic construct
GYDSPHKSGQKQS

SEQ ID NO: 2182 - protein, 13 aa, synthetic construct
GNGSPHSKAQNQE

SEQ ID NO: 2183 - protein, 13 aa, synthetic construct
GDDSPHKSVQNQQ

SEQ ID NO: 2184 - protein, 13 aa, synthetic construct
GHDSPHKSVQSHQ

SEQ ID NO: 2185 - protein, 13 aa, synthetic construct
GHDSPHKSGQFVV

SEQ ID NO: 2186 - protein, 13 aa, synthetic construct
GHDSPHKSRQNLQ

SEQ ID NO: 2187 - protein, 13 aa, synthetic construct
GHNSPHKSGQNQE

SEQ ID NO: 2188 - protein, 13 aa, synthetic construct
GHDSPHKSGQSQP

SEQ ID NO: 2189 - protein, 13 aa, synthetic construct
GHESPHKSGQNEQ

SEQ ID NO: 2190 - protein, 13 aa, synthetic construct
GHDSPHKSGQNQL

SEQ ID NO: 2191 - protein, 13 aa, synthetic construct
GHDSPHKSAQNLL

SEQ ID NO: 2192 - protein, 13 aa, synthetic construct
ASGSPHSKAINQQ

SEQ ID NO: 2193 - protein, 13 aa, synthetic construct
GNGSPHKRGQNQQ

SEQ ID NO: 2194 - protein, 13 aa, synthetic construct
GHDSPHKSGQSLQ

SEQ ID NO: 2195 - protein, 13 aa, synthetic construct
GHDSPHKSAQNHQ

SEQ ID NO: 2196 - protein, 13 aa, synthetic construct
GHDSPHKSGRNRQ

SEQ ID NO: 2197 - protein, 13 aa, synthetic construct
GHDSPHKYGQNEQ

SEQ ID NO: 2198 - protein, 13 aa, synthetic construct
GNGSPHSKAPNLQ

SEQ ID NO: 2199 - protein, 13 aa, synthetic construct
GHDSPHKSQQNQQ

SEQ ID NO: 2200 - protein, 13 aa, synthetic construct
GHDSPHKSVQSKQ

SEQ ID NO: 2201 - protein, 13 aa, synthetic construct
GNDSPHKIGHNQQ

SEQ ID NO: 2202 - protein, 13 aa, synthetic construct
GGGSPHSKAQDQQ

SEQ ID NO: 2203 - protein, 13 aa, synthetic construct
GQDSPHKSGQNPL

SEQ ID NO: 2204 - protein, 13 aa, synthetic construct
ASGSPHSKAQNHQ

SEQ ID NO: 2205 - protein, 13 aa, synthetic construct
GHDSPHKSGRDQK

SEQ ID NO: 2206 - protein, 13 aa, synthetic construct
GHDSPHKSVHNQQ

SEQ ID NO: 2207 - protein, 13 aa, synthetic construct
GHDSPHKSGQWKR

SEQ ID NO: 2208 - protein, 13 aa, synthetic construct
GSGSPHSKAENRQ

SEQ ID NO: 2209 - protein, 13 aa, synthetic construct
GHDSPHKSGQSQQ

SEQ ID NO: 2210 - protein, 13 aa, synthetic construct
GHDSPHKSRQAQQ

SEQ ID NO: 2211 - protein, 13 aa, synthetic construct
GHDSPHKSVQNHQ

SEQ ID NO: 2212 - protein, 13 aa, synthetic construct
GHDSPHKSKQNQQ

SEQ ID NO: 2213 - protein, 13 aa, synthetic construct
GHDSPHKSAQNQL

SEQ ID NO: 2214 - protein, 13 aa, synthetic construct
GHDSPHKSGQTQP

SEQ ID NO: 2215 - protein, 13 aa, synthetic construct
GHDSPHKLWINQQ

SEQ ID NO: 2216 - protein, 13 aa, synthetic construct
GPDSPHKSGQNQQ

SEQ ID NO: 2217 - protein, 13 aa, synthetic construct
GHDSPHKSVQKQL

SEQ ID NO: 2218 - protein, 13 aa, synthetic construct
GHPSPHWKGQNQQ

SEQ ID NO: 2219 - protein, 13 aa, synthetic construct
GHDSPHKSGRNQL

SEQ ID NO: 2220 - protein, 13 aa, synthetic construct
GSGSPHSKVQDQQ

SEQ ID NO: 2221 - protein, 13 aa, synthetic construct
GHDSPHKMGRNQQ

SEQ ID NO: 2222 - protein, 13 aa, synthetic construct
GHDSPHKSGISIQ

SEQ ID NO: 2223 - protein, 13 aa, synthetic construct
GHDSPHKSVQNLQ

SEQ ID NO: 2224 - protein, 13 aa, synthetic construct
GHDSPHKMAHNQQ

SEQ ID NO: 2225 - protein, 13 aa, synthetic construct
GHDSPHKHGQNQQ

SEQ ID NO: 2226 - protein, 13 aa, synthetic construct
GHDSPHKSVQSQQ

SEQ ID NO: 2227 - protein, 13 aa, synthetic construct
GHDSPHKSGQTVC

SEQ ID NO: 2228 - protein, 13 aa, synthetic construct
GQDSPHKSGQYQQ

SEQ ID NO: 2229 - protein, 13 aa, synthetic construct
GHDSPHKSGQQIM

SEQ ID NO: 2230 - protein, 13 aa, synthetic construct
GHDSPHKSRQNEQ

SEQ ID NO: 2231 - protein, 13 aa, synthetic construct
GHDSPHKSGLNHQ

SEQ ID NO: 2232 - protein, 13 aa, synthetic construct
GYDSPHKSGQNQQ

SEQ ID NO: 2233 - protein, 13 aa, synthetic construct
GHDSPHKSGQNLQ

SEQ ID NO: 2234 - protein, 13 aa, synthetic construct
GHDSPHKSRQDQQ

SEQ ID NO: 2235 - protein, 13 aa, synthetic construct
GDDSPHKSGQKQL

SEQ ID NO: 2236 - protein, 13 aa, synthetic construct
GSGSPHSKAQNQA

SEQ ID NO: 2237 - protein, 13 aa, synthetic construct
GDDSPHKSGHNQQ

SEQ ID NO: 2238 - protein, 13 aa, synthetic construct
GHDSPHKSGQMIH

SEQ ID NO: 2239 - protein, 13 aa, synthetic construct
GHDSPHKSGRNHQ

SEQ ID NO: 2240 - protein, 13 aa, synthetic construct
GHDSPHKSVQNRQ

SEQ ID NO: 2241 - protein, 13 aa, synthetic construct
GHDSPHKSGQKMN

SEQ ID NO: 2242 - protein, 16 aa, synthetic construct
TINGSGSPHSKAQNQQ

SEQ ID NO: 2243 - protein, 16 aa, synthetic construct
TINGHDSPHKSGQNQQ

SEQ ID NO: 2244 - protein, 16 aa, synthetic construct
TIIGSGSPHSKAQNRH

SEQ ID NO: 2245 - protein, 16 aa, synthetic construct
TFPGSGSPHSKVQNQQ

SEQ ID NO: 2246 - protein, 16 aa, synthetic construct
TEKMSGSPHSKAQNQQ

SEQ ID NO: 2247 - protein, 16 aa, synthetic construct
EINGRGSPHSKAQNQQ

SEQ ID NO: 2248 - protein, 16 aa, synthetic construct
TVNRNGSPHSKAQNQQ

SEQ ID NO: 2249 - protein, 16 aa, synthetic construct
TVNGSGSPHSKARDQQ

SEQ ID NO: 2250 - protein, 16 aa, synthetic construct
TFNGSGSPHSKAPNLQ

SEQ ID NO: 2251 - protein, 16 aa, synthetic construct
TEKTSGSPHSKAQNQQ

SEQ ID NO: 2252 - protein, 16 aa, synthetic construct
TINGSGSPHSKAHVRQ

SEQ ID NO: 2253 - protein, 16 aa, synthetic construct
TVNGSGSPHSKAPNQH

SEQ ID NO: 2254 - protein, 16 aa, synthetic construct
TEKISGSPHSKAQNQQ

SEQ ID NO: 2255 - protein, 16 aa, synthetic construct
TINGPGSPHSKAHNQQ

SEQ ID NO: 2256 - protein, 16 aa, synthetic construct
TVNGSGSPHSKTQSQQ

SEQ ID NO: 2257 - protein, 16 aa, synthetic construct
SINESGSPHSKAQNQQ

SEQ ID NO: 2258 - protein, 16 aa, synthetic construct
TERTSGSPHSKAQNQQ

SEQ ID NO: 2259 - protein, 16 aa, synthetic construct
TINGSGSPHSKAQPAK

SEQ ID NO: 2260 - protein, 16 aa, synthetic construct
TEKSSGSPHSKAQNQQ

SEQ ID NO: 2261 - protein, 16 aa, synthetic construct
TSYGNGSPHSKAQNQQ

SEQ ID NO: 2262 - protein, 16 aa, synthetic construct
TEKGSGSPHSKAQNQQ

SEQ ID NO: 2263 - protein, 16 aa, synthetic construct
TINGSGSPHSKSQTQQ

SEQ ID NO: 2264 - protein, 16 aa, synthetic construct
TERISGSPHSKAQNQQ

SEQ ID NO: 2265 - protein, 16 aa, synthetic construct
TERASGSPHSKAQNQQ

SEQ ID NO: 2266 - protein, 16 aa, synthetic construct
ELHGSGSPHSKAQNQQ

SEQ ID NO: 2267 - protein, 16 aa, synthetic construct
AINGSGSPHSKAQNLA

SEQ ID NO: 2268 - protein, 16 aa, synthetic construct
TVNGSGSPHSKSQNQL

SEQ ID NO: 2269 - protein, 16 aa, synthetic construct
TERNSGSPHSKAQNQQ

SEQ ID NO: 2270 - protein, 16 aa, synthetic construct
SVNGNGSPHSKAQNQQ

SEQ ID NO: 2271 - protein, 16 aa, synthetic construct
TFNGSGSPHSKAQGQQ

SEQ ID NO: 2272 - protein, 16 aa, synthetic construct
TERVSGSPHSKAQNQQ

SEQ ID NO: 2273 - protein, 16 aa, synthetic construct
TINGSGSPHSKALNRQ

SEQ ID NO: 2274 - protein, 16 aa, synthetic construct
TERLSGSPHSKAQNQQ

SEQ ID NO: 2275 - protein, 16 aa, synthetic construct
TDNGSGSPHSKAHNQQ

SEQ ID NO: 2276 - protein, 16 aa, synthetic construct
TFHGSGSPHSKTQNQQ

SEQ ID NO: 2277 - protein, 16 aa, synthetic construct
TINGGGSPHSKAQTQQ

SEQ ID NO: 2278 - protein, 16 aa, synthetic construct
TSNGSGSPHSKAQNPP

SEQ ID NO: 2279 - protein, 16 aa, synthetic construct
TINGSGSPHSKAQNLQ

SEQ ID NO: 2280 - protein, 16 aa, synthetic construct
TVHGNGSPHSKAQNQQ

SEQ ID NO: 2281 - protein, 16 aa, synthetic construct
TINGGGSPHSKAQNQQ

SEQ ID NO: 2282 - protein, 16 aa, synthetic construct
TENMSGSPHSKAQNQQ

SEQ ID NO: 2283 - protein, 16 aa, synthetic construct
TENVSGSPHSKAQNQQ

SEQ ID NO: 2284 - protein, 16 aa, synthetic construct
TSSGSGSPHSKAQYQQ

SEQ ID NO: 2285 - protein, 16 aa, synthetic construct
TIDGGGSPHSKAQNKQ

SEQ ID NO: 2286 - protein, 16 aa, synthetic construct
TEKVSGSPHSKAQNQQ

SEQ ID NO: 2287 - protein, 16 aa, synthetic construct
AINGSGSPHSKAQDQE

SEQ ID NO: 2288 - protein, 16 aa, synthetic construct
TCNKSGSPHSKAQNQQ

SEQ ID NO: 2289 - protein, 16 aa, synthetic construct
TINGGGSPHSKAQNQL

SEQ ID NO: 2290 - protein, 16 aa, synthetic construct
NINGGGSPHSKAQNQQ

SEQ ID NO: 2291 - protein, 16 aa, synthetic construct
TEHLSGSPHSKAQNQQ

SEQ ID NO: 2292 - protein, 16 aa, synthetic construct
AEMGSGSPHSKAQNQQ

SEQ ID NO: 2293 - protein, 16 aa, synthetic construct
ATNGSGSPHSKAQNHQ

SEQ ID NO: 2294 - protein, 16 aa, synthetic construct
AIKGSGSPHSKAQDQQ

SEQ ID NO: 2295 - protein, 16 aa, synthetic construct
TINGGGSPHSKSQNQL

SEQ ID NO: 2296 - protein, 16 aa, synthetic construct
TVNGNGSPHSKAQNKQ

SEQ ID NO: 2297 - protein, 16 aa, synthetic construct
TINGSGSPHSKGHWQQ

SEQ ID NO: 2298 - protein, 16 aa, synthetic construct
TDKTSGSPHSKAQNQQ

SEQ ID NO: 2299 - protein, 16 aa, synthetic construct
TFKGSGSPHSKAPNQQ

SEQ ID NO: 2300 - protein, 16 aa, synthetic construct
TVNGSGSPHSKAQNQL

SEQ ID NO: 2301 - protein, 16 aa, synthetic construct
TINGSGSPHSKRPEQQ

SEQ ID NO: 2302 - protein, 16 aa, synthetic construct
TINGSGSPHSKAQRTM

SEQ ID NO: 2303 - protein, 16 aa, synthetic construct
TEKASGSPHSKAQNQQ

SEQ ID NO: 2304 - protein, 16 aa, synthetic construct
SDQGSGSPHSKAQNQQ

SEQ ID NO: 2305 - protein, 16 aa, synthetic construct
TEITSGSPHSKAQNQQ

SEQ ID NO: 2306 - protein, 16 aa, synthetic construct
TDKSSGSPHSKAQNQQ

SEQ ID NO: 2307 - protein, 16 aa, synthetic construct
TIDGSGSPHSKAQNQQ

SEQ ID NO: 2308 - protein, 16 aa, synthetic construct
TVNGNGSPHSKAQNQH

SEQ ID NO: 2309 - protein, 16 aa, synthetic construct
NTNGSGSPHSKAQNQQ

SEQ ID NO: 2310 - protein, 16 aa, synthetic construct
TETHSGSPHSKAQNQQ

SEQ ID NO: 2311 - protein, 16 aa, synthetic construct
TINGGGSPHSKALNQQ

SEQ ID NO: 2312 - protein, 16 aa, synthetic construct
TINGSGSPHSKALHQH

SEQ ID NO: 2313 - protein, 16 aa, synthetic construct
TINGTGSPHSKAQNHQ

SEQ ID NO: 2314 - protein, 16 aa, synthetic construct
TINGSGSPHSKAQHRI

SEQ ID NO: 2315 - protein, 16 aa, synthetic construct
TINGSGSPHSKAQYIH

SEQ ID NO: 2316 - protein, 16 aa, synthetic construct
TENISGSPHSKAQNQQ

SEQ ID NO: 2317 - protein, 16 aa, synthetic construct
TIIGGGSPHSKAHNQQ

SEQ ID NO: 2318 - protein, 16 aa, synthetic construct
TINGSGSPHSKAQKFE

SEQ ID NO: 2319 - protein, 16 aa, synthetic construct
TSNESGSPHSKAQNHQ

SEQ ID NO: 2320 - protein, 16 aa, synthetic construct
TINGSGSPHSKAQFPS

SEQ ID NO: 2321 - protein, 16 aa, synthetic construct
TERPSGSPHSKAQNQQ

SEQ ID NO: 2322 - protein, 16 aa, synthetic construct
TINGNGSPHSKAQNPL

SEQ ID NO: 2323 - protein, 16 aa, synthetic construct
SIKGNGSPHSKAQNQQ

SEQ ID NO: 2324 - protein, 16 aa, synthetic construct
TERMSGSPHSKAQNQQ

SEQ ID NO: 2325 - protein, 16 aa, synthetic construct
TERSSGSPHSKAQNQQ

SEQ ID NO: 2326 - protein, 16 aa, synthetic construct
TELHSGSPHSKAQNQQ

SEQ ID NO: 2327 - protein, 16 aa, synthetic construct
TELTSGSPHSKAQNQQ

SEQ ID NO: 2328 - protein, 16 aa, synthetic construct
TINGSGSPHSKAHNQQ

SEQ ID NO: 2329 - protein, 16 aa, synthetic construct
TINGGGSPHSKAQSQQ

SEQ ID NO: 2330 - protein, 16 aa, synthetic construct
TINGSGSPHSKAQAIK

SEQ ID NO: 2331 - protein, 16 aa, synthetic construct
TENTSGSPHSKAQNQQ

SEQ ID NO: 2332 - protein, 16 aa, synthetic construct
TIDGSGSPHSKGQNRQ

SEQ ID NO: 2333 - protein, 16 aa, synthetic construct
NINGSGSPHSKAQSQQ

SEQ ID NO: 2334 - protein, 16 aa, synthetic construct
TINGSVSPHGKAQNQL

SEQ ID NO: 2335 - protein, 16 aa, synthetic construct
TSNASGSPHSKAQNQL

SEQ ID NO: 2336 - protein, 16 aa, synthetic construct
TEARSGSPHSKAQNQQ

SEQ ID NO: 2337 - protein, 16 aa, synthetic construct
TEKNSGSPHSKAQNQQ

SEQ ID NO: 2338 - protein, 16 aa, synthetic construct
TANGSGSPHSKAQYQQ

SEQ ID NO: 2339 - protein, 16 aa, synthetic construct
TVNGSGSPHSKAQYQH

SEQ ID NO: 2340 - protein, 16 aa, synthetic construct
TINGSGSPHTKAQNPQ

SEQ ID NO: 2341 - protein, 16 aa, synthetic construct
TINGSGSPHSKGQNPP

SEQ ID NO: 2342 - protein, 16 aa, synthetic construct
TIIGSGSPHSKAQHQL

SEQ ID NO: 2343 - protein, 16 aa, synthetic construct
TINGSGSPHSKAQSPP

SEQ ID NO: 2344 - protein, 16 aa, synthetic construct
TIYGSGSPHSKAQNQQ

SEQ ID NO: 2345 - protein, 16 aa, synthetic construct
TINGSGSPHSKAQAKL

SEQ ID NO: 2346 - protein, 16 aa, synthetic construct
TDKNSGSPHSKAQNQQ

SEQ ID NO: 2347 - protein, 16 aa, synthetic construct
TINGSGSPHSKTKSQQ

SEQ ID NO: 2348 - protein, 16 aa, synthetic construct
TINGSGSPHSKAQDRP

SEQ ID NO: 2349 - protein, 16 aa, synthetic construct
TINGIGSPHSKAQNLG

SEQ ID NO: 2350 - protein, 16 aa, synthetic construct
TINGSGSPHSKAQSQQ

SEQ ID NO: 2351 - protein, 16 aa, synthetic construct
TENLSGSPHSKAQNQQ

SEQ ID NO: 2352 - protein, 16 aa, synthetic construct
TINGSGSPHSKAQAFH

SEQ ID NO: 2353 - protein, 16 aa, synthetic construct
TINGSGSPHSKAQKQQ

SEQ ID NO: 2354 - protein, 16 aa, synthetic construct
TFSGSGSPHSKAQNLQ

SEQ ID NO: 2355 - protein, 16 aa, synthetic construct
AINGSGSPHSKAQNAQ

SEQ ID NO: 2356 - protein, 16 aa, synthetic construct
TESWSGSPHSKAQNQQ

SEQ ID NO: 2357 - protein, 16 aa, synthetic construct
TTNGSGSPHSKAHNQL

SEQ ID NO: 2358 - protein, 16 aa, synthetic construct
TVNGNGSPHSKAQNHQ

SEQ ID NO: 2359 - protein, 16 aa, synthetic construct
TEDKSGSPHSKAQNQQ

SEQ ID NO: 2360 - protein, 16 aa, synthetic construct
TESASGSPHSKAQNQQ

SEQ ID NO: 2361 - protein, 16 aa, synthetic construct
TNNGSGSPHSKAQNQQ

SEQ ID NO: 2362 - protein, 16 aa, synthetic construct
TSNGGGSPHSKAQNLQ

SEQ ID NO: 2363 - protein, 16 aa, synthetic construct
TDKMSGSPHSKAQNQQ

SEQ ID NO: 2364 - protein, 16 aa, synthetic construct
EVHGSGSPHSKAQNQQ

SEQ ID NO: 2365 - protein, 16 aa, synthetic construct
TINGSGSPHSKAQKLN

SEQ ID NO: 2366 - protein, 16 aa, synthetic construct
TINGGGSPHSKSQNQH

SEQ ID NO: 2367 - protein, 16 aa, synthetic construct
TVNGGGSPHSKAQSQQ

SEQ ID NO: 2368 - protein, 16 aa, synthetic construct
TTNGSGSPHSKAQYQH

SEQ ID NO: 2369 - protein, 16 aa, synthetic construct
TISGSGSPHSKAQYQH

SEQ ID NO: 2370 - protein, 16 aa, synthetic construct
TESTSGSPHSKAQNQQ

SEQ ID NO: 2371 - protein, 16 aa, synthetic construct
TINGSGSPHSKSQNVQ

SEQ ID NO: 2372 - protein, 16 aa, synthetic construct
SINGSGSPHSKAQAQQ

SEQ ID NO: 2373 - protein, 16 aa, synthetic construct
TVNGSGSPHSKAQNLQ

SEQ ID NO: 2374 - protein, 16 aa, synthetic construct
TVRDSGSPHSKAQNQQ

SEQ ID NO: 2375 - protein, 16 aa, synthetic construct
TFNASGSPHSKAPNQQ

SEQ ID NO: 2376 - protein, 16 aa, synthetic construct
TDRMSGSPHSKAQNQQ

SEQ ID NO: 2377 - protein, 16 aa, synthetic construct
TINGSGSPHSKAQTPP

SEQ ID NO: 2378 - protein, 16 aa, synthetic construct
TIKGSGSPHSKAQNQQ

SEQ ID NO: 2379 - protein, 16 aa, synthetic construct
NHIGSGSPHSKAQNQQ

SEQ ID NO: 2380 - protein, 16 aa, synthetic construct
TINGSGSPHSKAQYQH

SEQ ID NO: 2381 - protein, 16 aa, synthetic construct
TIPIDGSPHSKAQNQQ

SEQ ID NO: 2382 - protein, 16 aa, synthetic construct
TINGSGSPHSKAQGQQ

SEQ ID NO: 2383 - protein, 16 aa, synthetic construct
TFNGSGSPHNKAQNHQ

SEQ ID NO: 2384 - protein, 16 aa, synthetic construct
ESDGSGSPHSKAQNQQ

SEQ ID NO: 2385 - protein, 16 aa, synthetic construct
TINGSGSPHSKAQPPA

SEQ ID NO: 2386 - protein, 16 aa, synthetic construct
TINGSGSPHSKAQERP

SEQ ID NO: 2387 - protein, 16 aa, synthetic construct
TIKGSGSPHSKAQDLQ

SEQ ID NO: 2388 - protein, 16 aa, synthetic construct
TDLKSGSPHSKAQNQQ

SEQ ID NO: 2389 - protein, 16 aa, synthetic construct
TINGGGSPHSKAQNPP

SEQ ID NO: 2390 - protein, 16 aa, synthetic construct
TINGSGSPHSKAQAMH

SEQ ID NO: 2391 - protein, 16 aa, synthetic construct
TVPNSGSPHSKAQNQQ

SEQ ID NO: 2392 - protein, 16 aa, synthetic construct
TVIGSGSPHSKALNQQ

SEQ ID NO: 2393 - protein, 16 aa, synthetic construct
TINGSGSPHSKAQHPS

SEQ ID NO: 2394 - protein, 16 aa, synthetic construct
TINGLGSPHSKSQNQQ

SEQ ID NO: 2395 - protein, 16 aa, synthetic construct
TINGTGSPHSKAQNQQ

SEQ ID NO: 2396 - protein, 16 aa, synthetic construct
TINGSGSPHSKAPGLQ

SEQ ID NO: 2397 - protein, 16 aa, synthetic construct
TINGSGSPHSKAQGIR

SEQ ID NO: 2398 - protein, 16 aa, synthetic construct
TESHSGSPHSKAQNQQ

SEQ ID NO: 2399 - protein, 16 aa, synthetic construct
TINGSGSPHSKAQAPA

SEQ ID NO: 2400 - protein, 16 aa, synthetic construct
TINGSGSPHSKSQSQQ

SEQ ID NO: 2401 - protein, 16 aa, synthetic construct
AEHGSGSPHSKAQNQQ

SEQ ID NO: 2402 - protein, 16 aa, synthetic construct
TEDRSGSPHSKAQNQQ

SEQ ID NO: 2403 - protein, 16 aa, synthetic construct
NCLGSGSPHSKAQNQQ

SEQ ID NO: 2404 - protein, 16 aa, synthetic construct
TDRGSGSPHSKAQNQQ

SEQ ID NO: 2405 - protein, 16 aa, synthetic construct
TINGSGSPHSKAQIPP

SEQ ID NO: 2406 - protein, 16 aa, synthetic construct
TVKGSGSPHSKAQDQQ

SEQ ID NO: 2407 - protein, 16 aa, synthetic construct
NADGSGSPHSKAQNQQ

SEQ ID NO: 2408 - protein, 16 aa, synthetic construct
TDKVSGSPHSKAQNQQ

SEQ ID NO: 2409 - protein, 16 aa, synthetic construct
TITGSGSPHSKAQTQL

SEQ ID NO: 2410 - protein, 16 aa, synthetic construct
TINGSGSPHSKAQAPS

SEQ ID NO: 2411 - protein, 16 aa, synthetic construct
NCVGSGSPHSKAQNQQ

SEQ ID NO: 2412 - protein, 16 aa, synthetic construct
TIRDAGSPHSKAQNQQ

SEQ ID NO: 2413 - protein, 16 aa, synthetic construct
TVKDSGSPHSKAQNQQ

SEQ ID NO: 2414 - protein, 16 aa, synthetic construct
NALGSGSPHSKAQNQQ

SEQ ID NO: 2415 - protein, 16 aa, synthetic construct
VINGSGSPHSKGQNQQ

SEQ ID NO: 2416 - protein, 16 aa, synthetic construct
TVNGGGSPHSKAQNQQ

SEQ ID NO: 2417 - protein, 16 aa, synthetic construct
TIQDGGSPHSKAQNQQ

SEQ ID NO: 2418 - protein, 16 aa, synthetic construct
TISGGGSPHSKAQNQQ

SEQ ID NO: 2419 - protein, 16 aa, synthetic construct
TSNASGSPHSKAHNQQ

SEQ ID NO: 2420 - protein, 16 aa, synthetic construct
TINGSGSPHSKAQNTY

SEQ ID NO: 2421 - protein, 16 aa, synthetic construct
TINGSGSPHSKSQNQH

SEQ ID NO: 2422 - protein, 16 aa, synthetic construct
TINGGGSPHSKAQDKQ

SEQ ID NO: 2423 - protein, 16 aa, synthetic construct
TEFVSGSPHSKAQNQQ

SEQ ID NO: 2424 - protein, 16 aa, synthetic construct
TVNGSGSPHSKAQNHL

SEQ ID NO: 2425 - protein, 16 aa, synthetic construct
TREISGSPHSKAQNQQ

SEQ ID NO: 2426 - protein, 16 aa, synthetic construct
TINGSGSPHSKAQIGM

SEQ ID NO: 2427 - protein, 16 aa, synthetic construct
TIDGSGSPHSKALNKQ

SEQ ID NO: 2428 - protein, 16 aa, synthetic construct
TIIGGGSPHSKAQNPQ

SEQ ID NO: 2429 - protein, 16 aa, synthetic construct
QGEGSGSPHSKAQNQQ

SEQ ID NO: 2430 - protein, 16 aa, synthetic construct
TINGTGSPHSKAPNQL

SEQ ID NO: 2431 - protein, 16 aa, synthetic construct
TVNGSGSPHSKAQLQQ

SEQ ID NO: 2432 - protein, 16 aa, synthetic construct
TFNGGGSPHSKAQYQQ

SEQ ID NO: 2433 - protein, 16 aa, synthetic construct
SINGSGSPHSKTQSQQ

SEQ ID NO: 2434 - protein, 16 aa, synthetic construct
TVNGGGSPHSKAQHQQ

SEQ ID NO: 2435 - protein, 16 aa, synthetic construct
SEKGSGSPHSKAQNQQ

SEQ ID NO: 2436 - protein, 16 aa, synthetic construct
NVNGSGSPHSKAQNQQ

SEQ ID NO: 2437 - protein, 16 aa, synthetic construct
GGEGSGSPHSKAQNQQ

SEQ ID NO: 2438 - protein, 16 aa, synthetic construct
TINGSGSPHSKAQRMS

SEQ ID NO: 2439 - protein, 16 aa, synthetic construct
TINGSGSPHSKAQGIL

SEQ ID NO: 2440 - protein, 16 aa, synthetic construct
EFVGSGSPHSKAQNQQ

SEQ ID NO: 2441 - protein, 16 aa, synthetic construct
TIIGSGSPHSKAQDRQ

SEQ ID NO: 2442 - protein, 16 aa, synthetic construct
SDKGSGSPHSKAQNQQ

SEQ ID NO: 2443 - protein, 16 aa, synthetic construct
TEQVSGSPHSKAQNQQ

SEQ ID NO: 2444 - protein, 16 aa, synthetic construct
TEHVSGSPHSKAQNQQ

SEQ ID NO: 2445 - protein, 16 aa, synthetic construct
TINGSGSPHSKARDWQ

SEQ ID NO: 2446 - protein, 16 aa, synthetic construct
TENASGSPHSKAQNQQ

SEQ ID NO: 2447 - protein, 16 aa, synthetic construct
EVQGSGSPHSKAQNQQ

SEQ ID NO: 2448 - protein, 16 aa, synthetic construct
TINGSGSPHSKAQNTH

SEQ ID NO: 2449 - protein, 16 aa, synthetic construct
TINGSGSPHSKAPNLQ

SEQ ID NO: 2450 - protein, 16 aa, synthetic construct
TINGSGSPHSKAQERS

SEQ ID NO: 2451 - protein, 16 aa, synthetic construct
TSNGSGSPHSKAQNYQ

SEQ ID NO: 2452 - protein, 16 aa, synthetic construct
TEYISGSPHSKAQNQQ

SEQ ID NO: 2453 - protein, 16 aa, synthetic construct
TINGSGSPHSKAQRTC

SEQ ID NO: 2454 - protein, 16 aa, synthetic construct
TINGSGSPHSKAQIGH

SEQ ID NO: 2455 - protein, 16 aa, synthetic construct
NCWGSGSPHSKAQNQQ

SEQ ID NO: 2456 - protein, 16 aa, synthetic construct
TINGSGSPHSKAQGAI

SEQ ID NO: 2457 - protein, 16 aa, synthetic construct
TDVNSGSPHSKAQNQQ

SEQ ID NO: 2458 - protein, 16 aa, synthetic construct
SDIGSGSPHSKAQNQQ

SEQ ID NO: 2459 - protein, 16 aa, synthetic construct
TINGSGSPHSKAQVPP

SEQ ID NO: 2460 - protein, 16 aa, synthetic construct
TINGSGSPHSKAQVQQ

SEQ ID NO: 2461 - protein, 16 aa, synthetic construct
TINGSGSPHSKALMRQ

SEQ ID NO: 2462 - protein, 16 aa, synthetic construct
TINGSGSPHSKAQYSV

SEQ ID NO: 2463 - protein, 16 aa, synthetic construct
NSIGSGSPHSKAQNQQ

SEQ ID NO: 2464 - protein, 16 aa, synthetic construct
TINGSGSPHSKVPNLQ

SEQ ID NO: 2465 - protein, 16 aa, synthetic construct
AINGSGSPHSKAQSQQ

SEQ ID NO: 2466 - protein, 16 aa, synthetic construct
TINGSGSPHSKAQAIT

SEQ ID NO: 2467 - protein, 16 aa, synthetic construct
TINGSGSPHSKAQKTL

SEQ ID NO: 2468 - protein, 16 aa, synthetic construct
TVNGSGSPHSKAQNQW

SEQ ID NO: 2469 - protein, 16 aa, synthetic construct
TINGSGSPHSKAQLHH

SEQ ID NO: 2470 - protein, 16 aa, synthetic construct
TEQTSGSPHSKAQNQQ

SEQ ID NO: 2471 - protein, 16 aa, synthetic construct
TINGSGSPHSKAQNII

SEQ ID NO: 2472 - protein, 16 aa, synthetic construct
NSLGSGSPHSKAQNQQ

SEQ ID NO: 2473 - protein, 16 aa, synthetic construct
TIPMEGSPHSKAQNQQ

SEQ ID NO: 2474 - protein, 16 aa, synthetic construct
TINGSGSPHSKAQGHH

SEQ ID NO: 2475 - protein, 16 aa, synthetic construct
TDRTSGSPHSKAQNQQ

SEQ ID NO: 2476 - protein, 16 aa, synthetic construct
TINGSGSPHSKAQSKV

SEQ ID NO: 2477 - protein, 16 aa, synthetic construct
EVVGSGSPHSKAQNQQ

SEQ ID NO: 2478 - protein, 16 aa, synthetic construct
TINGSGSPHSKAQLPS

SEQ ID NO: 2479 - protein, 16 aa, synthetic construct
TINGSGSPHSKAIGKQ

SEQ ID NO: 2480 - protein, 16 aa, synthetic construct
TEPTSGSPHSKAQNQQ

SEQ ID NO: 2481 - protein, 16 aa, synthetic construct
TVNGGGSPHSKSQNQQ

SEQ ID NO: 2482 - protein, 16 aa, synthetic construct
TINGSGSPHSKAQAIH

SEQ ID NO: 2483 - protein, 16 aa, synthetic construct
TINGSGSPHSKAQHGL

SEQ ID NO: 2484 - protein, 16 aa, synthetic construct
SELGSGSPHSKAQNQQ

SEQ ID NO: 2485 - protein, 16 aa, synthetic construct
TINGSGSPHSKAQFMC

SEQ ID NO: 2486 - protein, 16 aa, synthetic construct
TINVSGSPHSKAQGQQ

SEQ ID NO: 2487 - protein, 16 aa, synthetic construct
TINGGGSPHSKAQNQM

SEQ ID NO: 2488 - protein, 16 aa, synthetic construct
TVNGSGSPHSKAQHLQ

SEQ ID NO: 2489 - protein, 16 aa, synthetic construct
TIRENGSPHSKAQNQQ

SEQ ID NO: 2490 - protein, 16 aa, synthetic construct
TINGSGSPHSKTQNHQ

SEQ ID NO: 2491 - protein, 16 aa, synthetic construct
TINGSGSPHSKAQPAR

SEQ ID NO: 2492 - protein, 16 aa, synthetic construct
TVNGSGSPHSKAQSLQ

SEQ ID NO: 2493 - protein, 16 aa, synthetic construct
TINGSGSPHSKSQSQL

SEQ ID NO: 2494 - protein, 16 aa, synthetic construct
TINGSASPHSKAHSQQ

SEQ ID NO: 2495 - protein, 16 aa, synthetic construct
TWQNSGSPHSKAQNQQ

SEQ ID NO: 2496 - protein, 16 aa, synthetic construct
TINGSGSPHSKAQDRQ

SEQ ID NO: 2497 - protein, 16 aa, synthetic construct
TINGSGSPHSKAQMPS

SEQ ID NO: 2498 - protein, 16 aa, synthetic construct
TNNGGGSPHSKAQNLQ

SEQ ID NO: 2499 - protein, 16 aa, synthetic construct
TINGSGSPHSKAQGSL

SEQ ID NO: 2500 - protein, 16 aa, synthetic construct
TEVTSGSPHSKAQNQQ

SEQ ID NO: 2501 - protein, 16 aa, synthetic construct
SINGGGSPHSKAQYQQ

SEQ ID NO: 2502 - protein, 16 aa, synthetic construct
TVIGSGSPHSKSQNQQ

SEQ ID NO: 2503 - protein, 16 aa, synthetic construct
AVNVSGSPHSKAQNQQ

SEQ ID NO: 2504 - protein, 16 aa, synthetic construct
TVNGNGSPHSKSQNQQ

SEQ ID NO: 2505 - protein, 16 aa, synthetic construct
TDRNSGSPHSKAQNQQ

SEQ ID NO: 2506 - protein, 16 aa, synthetic construct
TINGSGSPHSKAQVPA

SEQ ID NO: 2507 - protein, 16 aa, synthetic construct
GVLGSGSPHSKAQNQQ

SEQ ID NO: 2508 - protein, 16 aa, synthetic construct
TLNGNGSPHSKAQNLQ

SEQ ID NO: 2509 - protein, 16 aa, synthetic construct
AINGSGSPHSKAQDKQ

SEQ ID NO: 2510 - protein, 16 aa, synthetic construct
TSNGSGSPHSKAHYQQ

SEQ ID NO: 2511 - protein, 16 aa, synthetic construct
TINGSGSPHSKAQVPS

SEQ ID NO: 2512 - protein, 16 aa, synthetic construct
TELRSGSPHSKAQNQQ

SEQ ID NO: 2513 - protein, 16 aa, synthetic construct
NINGSGSPHSKAQNHQ

SEQ ID NO: 2514 - protein, 16 aa, synthetic construct
TVNGGGSPHSKAQNHQ

SEQ ID NO: 2515 - protein, 16 aa, synthetic construct
TINGSGSPHSKARGEQ

SEQ ID NO: 2516 - protein, 16 aa, synthetic construct
TINGGGSPHSKAQYQH

SEQ ID NO: 2517 - protein, 16 aa, synthetic construct
TEDLSGSPHSKAQNQQ

SEQ ID NO: 2518 - protein, 16 aa, synthetic construct
TINGSGSPHSKAPGQQ

SEQ ID NO: 2519 - protein, 16 aa, synthetic construct
TIPKNGSPHSKAQNQQ

SEQ ID NO: 2520 - protein, 16 aa, synthetic construct
TINGSGSPHSKAQSLQ

SEQ ID NO: 2521 - protein, 16 aa, synthetic construct
TINGSGSPHSKRLEQQ

SEQ ID NO: 2522 - protein, 16 aa, synthetic construct
TERGSGSPHSKAQNQQ

SEQ ID NO: 2523 - protein, 16 aa, synthetic construct
TVNGSGSPHSKAPNQQ

SEQ ID NO: 2524 - protein, 16 aa, synthetic construct
TSNGSGSPHSKAQNQS

SEQ ID NO: 2525 - protein, 16 aa, synthetic construct
TINGSGSPHSKAQKVI

SEQ ID NO: 2526 - protein, 16 aa, synthetic construct
TEGISGSPHSKAQNQQ

SEQ ID NO: 2527 - protein, 16 aa, synthetic construct
TINGSGSPHSKAQNND

SEQ ID NO: 2528 - protein, 16 aa, synthetic construct
TINGSGSPHSKAQSVH

SEQ ID NO: 2529 - protein, 16 aa, synthetic construct
TINGSGSPHSKAQPLG

SEQ ID NO: 2530 - protein, 16 aa, synthetic construct
TINKEGSPHSKAQNQQ

SEQ ID NO: 2531 - protein, 16 aa, synthetic construct
TCNASGSPHSKAQNQQ

SEQ ID NO: 2532 - protein, 16 aa, synthetic construct
AINGSGSPHSKAHNQE

SEQ ID NO: 2533 - protein, 16 aa, synthetic construct
TEGLSGSPHSKAQNQQ

SEQ ID NO: 2534 - protein, 16 aa, synthetic construct
TRDASGSPHSKAQNQQ

SEQ ID NO: 2535 - protein, 16 aa, synthetic construct
TSNGSGSPHSKAQNLQ

SEQ ID NO: 2536 - protein, 16 aa, synthetic construct
TGNGSGSPHSKAQIQQ

SEQ ID NO: 2537 - protein, 16 aa, synthetic construct
TVNGGGSPHSKAQNLQ

SEQ ID NO: 2538 - protein, 16 aa, synthetic construct
TDRSSGSPHSKAQNQQ

SEQ ID NO: 2539 - protein, 16 aa, synthetic construct
TINGSGSPHSKAQVRN

SEQ ID NO: 2540 - protein, 16 aa, synthetic construct
TINGSGSPHSKAPSNQ

SEQ ID NO: 2541 - protein, 16 aa, synthetic construct
TINGSGSPHSKAQVGH

SEQ ID NO: 2542 - protein, 16 aa, synthetic construct
NAIGSGSPHSKAQNQQ

SEQ ID NO: 2543 - protein, 16 aa, synthetic construct
AENGSGSPHSKAQNQQ

SEQ ID NO: 2544 - protein, 16 aa, synthetic construct
TINGSGSPHSKAQRDI

SEQ ID NO: 2545 - protein, 16 aa, synthetic construct
TINGSGSPHSKAQMPN

SEQ ID NO: 2546 - protein, 16 aa, synthetic construct
TVNGSGSPHSKSQNQQ

SEQ ID NO: 2547 - protein, 16 aa, synthetic construct
TIPAIGSPHSKAQNQQ

SEQ ID NO: 2548 - protein, 16 aa, synthetic construct
TINGSGSPHSKARGLQ

SEQ ID NO: 2549 - protein, 16 aa, synthetic construct
TELGSGSPHSKAQNQQ

SEQ ID NO: 2550 - protein, 16 aa, synthetic construct
AETGSGSPHSKAQNQQ

SEQ ID NO: 2551 - protein, 16 aa, synthetic construct
TINGSGSPHSKLQKQQ

SEQ ID NO: 2552 - protein, 16 aa, synthetic construct
TINGSGSPHSKAPSLQ

SEQ ID NO: 2553 - protein, 16 aa, synthetic construct
TINGSGSPHSKAQRDQ

SEQ ID NO: 2554 - protein, 16 aa, synthetic construct
TDVGSGSPHSKAQNQQ

SEQ ID NO: 2555 - protein, 16 aa, synthetic construct
TINGSGSPHSKNRDQQ

SEQ ID NO: 2556 - protein, 16 aa, synthetic construct
SINGSGSPHSKAPNLQ

SEQ ID NO: 2557 - protein, 16 aa, synthetic construct
TINGSGSPHSKAQAKG

SEQ ID NO: 2558 - protein, 16 aa, synthetic construct
TVNGSGSPHSKAQDKQ

SEQ ID NO: 2559 - protein, 16 aa, synthetic construct
TINGGGSPHSKAQNPQ

SEQ ID NO: 2560 - protein, 16 aa, synthetic construct
TINGSGSPHSKAQSAH

SEQ ID NO: 2561 - protein, 16 aa, synthetic construct
TINGNGSPHSKSQNQH

SEQ ID NO: 2562 - protein, 16 aa, synthetic construct
TVPTSGSPHSKAQNQQ

SEQ ID NO: 2563 - protein, 16 aa, synthetic construct
TIDGSGSPHSKSQNHQ

SEQ ID NO: 2564 - protein, 16 aa, synthetic construct
TDVKSGSPHSKAQNQQ

SEQ ID NO: 2565 - protein, 16 aa, synthetic construct
AINRSGSPHSKAQDQQ

SEQ ID NO: 2566 - protein, 16 aa, synthetic construct
TINGSGSPHSKAQSTM

SEQ ID NO: 2567 - protein, 16 aa, synthetic construct
TVNASGSPHSKAQNQL

SEQ ID NO: 2568 - protein, 16 aa, synthetic construct
TINGSGSPHSKAQREM

SEQ ID NO: 2569 - protein, 16 aa, synthetic construct
TVHGSGSPHSKAQSQQ

SEQ ID NO: 2570 - protein, 16 aa, synthetic construct
TINGGGSPHSKSQNRQ

SEQ ID NO: 2571 - protein, 16 aa, synthetic construct
TINGSGSPHSKAQYRA

SEQ ID NO: 2572 - protein, 16 aa, synthetic construct
TINGGGSPHSKAQRQQ

SEQ ID NO: 2573 - protein, 16 aa, synthetic construct
TEPMSGSPHSKAQNQQ

SEQ ID NO: 2574 - protein, 16 aa, synthetic construct
TINGSGSPHSKNQWQQ

SEQ ID NO: 2575 - protein, 16 aa, synthetic construct
ETAGSGSPHSKAQNQQ

SEQ ID NO: 2576 - protein, 16 aa, synthetic construct
TINGSGSPHSKAQRMN

SEQ ID NO: 2577 - protein, 16 aa, synthetic construct
NNLGSGSPHSKAQNQQ

SEQ ID NO: 2578 - protein, 16 aa, synthetic construct
TINGSGSPHAKAQNHQ

SEQ ID NO: 2579 - protein, 16 aa, synthetic construct
TIIKNGSPHSKAQNQQ

SEQ ID NO: 2580 - protein, 16 aa, synthetic construct
TINGSGSPHSKAGDSQ

SEQ ID NO: 2581 - protein, 16 aa, synthetic construct
TINGSGSPHSKLKSQQ

SEQ ID NO: 2582 - protein, 16 aa, synthetic construct
TINGSGSPHSKAQKIS

SEQ ID NO: 2583 - protein, 16 aa, synthetic construct
TEYNSGSPHSKAQNQQ

SEQ ID NO: 2584 - protein, 16 aa, synthetic construct
TINGSGSPHSKAPSMQ

SEQ ID NO: 2585 - protein, 16 aa, synthetic construct
AINGSGSPHSKAQNQQ

SEQ ID NO: 2586 - protein, 16 aa, synthetic construct
TINGSGSPHSKASPRQ

SEQ ID NO: 2587 - protein, 16 aa, synthetic construct
TINGSGSPHSKRMEQQ

SEQ ID NO: 2588 - protein, 16 aa, synthetic construct
TINGSGSPHSKAQYQN

SEQ ID NO: 2589 - protein, 16 aa, synthetic construct
TINGSGSPHSKAQYYV

SEQ ID NO: 2590 - protein, 16 aa, synthetic construct
TINGSGSPHSKLRRQQ

SEQ ID NO: 2591 - protein, 16 aa, synthetic construct
TINGSGSPHSKAGCGQ

SEQ ID NO: 2592 - protein, 16 aa, synthetic construct
SMNGSGSPHSRAQNQQ

SEQ ID NO: 2593 - protein, 16 aa, synthetic construct
TINGSGSPHSKRLRQQ

SEQ ID NO: 2594 - protein, 16 aa, synthetic construct
TINGSGSPHSLRRNQQ

SEQ ID NO: 2595 - protein, 16 aa, synthetic construct
TINGSGSPHSRGRNQQ

SEQ ID NO: 2596 - protein, 16 aa, synthetic construct
TINGSGSPHSSRRNQQ

SEQ ID NO: 2597 - protein, 16 aa, synthetic construct
TINGSGSPHSKAFRLQ

SEQ ID NO: 2598 - protein, 16 aa, synthetic construct
TINGSCSPHRKAQNQQ

SEQ ID NO: 2599 - protein, 16 aa, synthetic construct
TINGSGSPHFLRQNQQ

SEQ ID NO: 2600 - protein, 16 aa, synthetic construct
TINGSGSPHSLRFNQQ

SEQ ID NO: 2601 - protein, 16 aa, synthetic construct
TINGSGSPHSKWLLQQ

SEQ ID NO: 2602 - protein, 16 aa, synthetic construct
TINGSGSPHSKRRLQQ

SEQ ID NO: 2603 - protein, 16 aa, synthetic construct
TINGSGSPHSKAQRKL

SEQ ID NO: 2604 - protein, 16 aa, synthetic construct
TINGSGSPHSKALRRQ

SEQ ID NO: 2605 - protein, 16 aa, synthetic construct
TINGSGSPHSKAQRLR

SEQ ID NO: 2606 - protein, 16 aa, synthetic construct
YLSGSGSPHSKAQNQQ

SEQ ID NO: 2607 - protein, 16 aa, synthetic construct
TINGSGSPHSKAQRRL

SEQ ID NO: 2608 - protein, 16 aa, synthetic construct
TINGSGSPHSKARRQQ

SEQ ID NO: 2609 - protein, 16 aa, synthetic construct
TINGSGSPHSKARRLQ

SEQ ID NO: 2610 - protein, 16 aa, synthetic construct
TINGSGSPHSKSRRQQ

SEQ ID NO: 2611 - protein, 16 aa, synthetic construct
TINGLLSPHWKAQNQQ

SEQ ID NO: 2612 - protein, 16 aa, synthetic construct
TINGSGSPHSKARLRQ

SEQ ID NO: 2613 - protein, 16 aa, synthetic construct
TINGSGSPHSKASKRQ

SEQ ID NO: 2614 - protein, 16 aa, synthetic construct
TINGSGSPHVRRQNQQ

SEQ ID NO: 2615 - protein, 16 aa, synthetic construct
TINGSGSPHSKAQLYR

SEQ ID NO: 2616 - protein, 16 aa, synthetic construct
GLSGSGSPHSKAQNQQ

SEQ ID NO: 2617 - protein, 16 aa, synthetic construct
TINGSGSPHSKAQLTV

SEQ ID NO: 2618 - protein, 16 aa, synthetic construct
TINGHDSPHKRGQHRQ

SEQ ID NO: 2619 - protein, 16 aa, synthetic construct
MPEGHDSPHKSGQNQQ

SEQ ID NO: 2620 - protein, 16 aa, synthetic construct
MEGGHDSPHKSGQNQQ

SEQ ID NO: 2621 - protein, 16 aa, synthetic construct
MEYGHDSPHKSGQNQQ

SEQ ID NO: 2622 - protein, 16 aa, synthetic construct
AEWGHDSPHKSGQNQQ

SEQ ID NO: 2623 - protein, 16 aa, synthetic construct
CEWGHDSPHKSGQNQQ

SEQ ID NO: 2624 - protein, 16 aa, synthetic construct
ANNGQDSPHKSGQNQQ

SEQ ID NO: 2625 - protein, 16 aa, synthetic construct
IPEGHDSPHKSGQNQQ

SEQ ID NO: 2626 - protein, 16 aa, synthetic construct
ADMGHDSPHKSGQNQQ

SEQ ID NO: 2627 - protein, 16 aa, synthetic construct
IEYGHDSPHKSGQNQQ

SEQ ID NO: 2628 - protein, 16 aa, synthetic construct
ADYGHDSPHKSGQNQQ

SEQ ID NO: 2629 - protein, 16 aa, synthetic construct
IETGHDSPHKSGQNQQ

SEQ ID NO: 2630 - protein, 16 aa, synthetic construct
MEWGHDSPHKSGQNQQ

SEQ ID NO: 2631 - protein, 16 aa, synthetic construct
CEYGHDSPHKSGQNQQ

SEQ ID NO: 2632 - protein, 16 aa, synthetic construct
RINGHDSPHKSGQKQQ

SEQ ID NO: 2633 - protein, 16 aa, synthetic construct
MEIGHDSPHKSGQNQQ

SEQ ID NO: 2634 - protein, 16 aa, synthetic construct
LEYGHDSPHKSGQNQQ

SEQ ID NO: 2635 - protein, 16 aa, synthetic construct
ADWGHDSPHKSGQNQQ

SEQ ID NO: 2636 - protein, 16 aa, synthetic construct
IEIGHDSPHKSGQNQQ

SEQ ID NO: 2637 - protein, 16 aa, synthetic construct
DIMGHDSPHKSGQNQQ

SEQ ID NO: 2638 - protein, 16 aa, synthetic construct
FEQGHDSPHKSGQNQQ

SEQ ID NO: 2639 - protein, 16 aa, synthetic construct
MEFGHDSPHKSGQNQQ

SEQ ID NO: 2640 - protein, 16 aa, synthetic construct
CDQGHDSPHKSGQNQQ

SEQ ID NO: 2641 - protein, 16 aa, synthetic construct
LPEGHDSPHKSGQNQQ

SEQ ID NO: 2642 - protein, 16 aa, synthetic construct
IENGHDSPHKSGQNQQ

SEQ ID NO: 2643 - protein, 16 aa, synthetic construct
MESGHDSPHKSGQNQQ

SEQ ID NO: 2644 - protein, 16 aa, synthetic construct
AEIGHDSPHKSGQNQQ

SEQ ID NO: 2645 - protein, 16 aa, synthetic construct
VEYGHDSPHKSGQNQQ

SEQ ID NO: 2646 - protein, 16 aa, synthetic construct
IINGHDSPHKSGLTQQ

SEQ ID NO: 2647 - protein, 16 aa, synthetic construct
TSNGDDSPHKSGRNQQ

SEQ ID NO: 2648 - protein, 16 aa, synthetic construct
IEVGHDSPHKSGQNQQ

SEQ ID NO: 2649 - protein, 16 aa, synthetic construct
MEMGHDSPHKSGQNQQ

SEQ ID NO: 2650 - protein, 16 aa, synthetic construct
AEVGHDSPHKSGQNQQ

SEQ ID NO: 2651 - protein, 16 aa, synthetic construct
MDAGHDSPHKSGQNQQ

SEQ ID NO: 2652 - protein, 16 aa, synthetic construct
VEWGHDSPHKSGQNQQ

SEQ ID NO: 2653 - protein, 16 aa, synthetic construct
AEQGHDSPHKSGQNQQ

SEQ ID NO: 2654 - protein, 16 aa, synthetic construct
LEWGHDSPHKSGQNQQ

SEQ ID NO: 2655 - protein, 16 aa, synthetic construct
MELGHDSPHKSGQNQQ

SEQ ID NO: 2656 - protein, 16 aa, synthetic construct
METGHDSPHKSGQNQQ

SEQ ID NO: 2657 - protein, 16 aa, synthetic construct
MEAGHDSPHKSGQNQQ

SEQ ID NO: 2658 - protein, 16 aa, synthetic construct
IESGHDSPHKSGQNQQ

SEQ ID NO: 2659 - protein, 16 aa, synthetic construct
MEVGHDSPHKSGQNQQ

SEQ ID NO: 2660 - protein, 16 aa, synthetic construct
CEIGHDSPHKSGQNQQ

SEQ ID NO: 2661 - protein, 16 aa, synthetic construct
ATNGHDSPHKSGLNQQ

SEQ ID NO: 2662 - protein, 16 aa, synthetic construct
MDGGHDSPHKSGQNQQ

SEQ ID NO: 2663 - protein, 16 aa, synthetic construct
QEVGHDSPHKSGQNQQ

SEQ ID NO: 2664 - protein, 16 aa, synthetic construct
ADQGHDSPHKSGQNQQ

SEQ ID NO: 2665 - protein, 16 aa, synthetic construct
TINGHESPHKSAQNHQ

SEQ ID NO: 2666 - protein, 16 aa, synthetic construct
TINGHDSPHKSAQNQW

SEQ ID NO: 2667 - protein, 16 aa, synthetic construct
NMNGHDSPHKSGQNTH

SEQ ID NO: 2668 - protein, 16 aa, synthetic construct
IEMGHDSPHKSGQNQQ

SEQ ID NO: 2669 - protein, 16 aa, synthetic construct
TINGHDSPHKSGRRRQ

SEQ ID NO: 2670 - protein, 16 aa, synthetic construct
ISNGHDSPHKSAQNQQ

SEQ ID NO: 2671 - protein, 16 aa, synthetic construct
TGNGHDSPHKSGQYQQ

SEQ ID NO: 2672 - protein, 16 aa, synthetic construct
TINGNYSPHKIGQNQQ

SEQ ID NO: 2673 - protein, 16 aa, synthetic construct
TINGHDSPHKSRQNDQ

SEQ ID NO: 2674 - protein, 16 aa, synthetic construct
QQQGHDSPHKSGQNQQ

SEQ ID NO: 2675 - protein, 16 aa, synthetic construct
HDWGHDSPHKSGQNQQ

SEQ ID NO: 2676 - protein, 16 aa, synthetic construct
IEGGHDSPHKSGQNQQ

SEQ ID NO: 2677 - protein, 16 aa, synthetic construct
TFNRSGSPHSKAQNQQ

SEQ ID NO: 2678 - protein, 16 aa, synthetic construct
AINGHDSPHKSGQIRQ

SEQ ID NO: 2679 - protein, 16 aa, synthetic construct
TINGHDSPHKIGQNQH

SEQ ID NO: 2680 - protein, 16 aa, synthetic construct
AINGYDSPHKSGQKQQ

SEQ ID NO: 2681 - protein, 16 aa, synthetic construct
TESGHDSPHKSGQNQQ

SEQ ID NO: 2682 - protein, 16 aa, synthetic construct
TINGHDSPHKSGQSVQ

SEQ ID NO: 2683 - protein, 16 aa, synthetic construct
TINGHESPHKSGRSQQ

SEQ ID NO: 2684 - protein, 16 aa, synthetic construct
TINGHDSPHKSGQNKL

SEQ ID NO: 2685 - protein, 16 aa, synthetic construct
TINGHDSPHKTGQNQQ

SEQ ID NO: 2686 - protein, 16 aa, synthetic construct
TINGRGSPHKRGQNQQ

SEQ ID NO: 2687 - protein, 16 aa, synthetic construct
TINGSGSPHTKAQNPP

SEQ ID NO: 2688 - protein, 16 aa, synthetic construct
TINGQDSPHKSGQHQQ

SEQ ID NO: 2689 - protein, 16 aa, synthetic construct
SINGHDSPHKSGQIQH

SEQ ID NO: 2690 - protein, 16 aa, synthetic construct
AINGHDSPHKSGPRQQ

SEQ ID NO: 2691 - protein, 16 aa, synthetic construct
TVNGHDSPHKSGHTQQ

SEQ ID NO: 2692 - protein, 16 aa, synthetic construct
SINGHDSPHKSGQRQH

SEQ ID NO: 2693 - protein, 16 aa, synthetic construct
SLNGSGSPHTKAQNQQ

SEQ ID NO: 2694 - protein, 16 aa, synthetic construct
AINGHDSPHKSAQSQQ

SEQ ID NO: 2695 - protein, 16 aa, synthetic construct
SIYGHESPHKSGQNQQ

SEQ ID NO: 2696 - protein, 16 aa, synthetic construct
TVNGHDSPHKSLQNQQ

SEQ ID NO: 2697 - protein, 16 aa, synthetic construct
TINGHGSPHSKAQNPQ

SEQ ID NO: 2698 - protein, 16 aa, synthetic construct
TSNGYDSPHKSGQKQQ

SEQ ID NO: 2699 - protein, 16 aa, synthetic construct
TVNGHDSPHKSGRNQE

SEQ ID NO: 2700 - protein, 16 aa, synthetic construct
TTNGHDSPHKSGQTQL

SEQ ID NO: 2701 - protein, 16 aa, synthetic construct
AINGHDSPHKSEKNQQ

SEQ ID NO: 2702 - protein, 16 aa, synthetic construct
IINGRDSPHKSGQDQQ

SEQ ID NO: 2703 - protein, 16 aa, synthetic construct
TISGHDSPHKTGHNQQ

SEQ ID NO: 2704 - protein, 16 aa, synthetic construct
SINGYDSPHKSGQTQQ

SEQ ID NO: 2705 - protein, 16 aa, synthetic construct
TINGHESPHKSGQTQQ

SEQ ID NO: 2706 - protein, 16 aa, synthetic construct
TINGHDSPHKSGQSKQ

SEQ ID NO: 2707 - protein, 16 aa, synthetic construct
AIIGHESPHKSGQNQQ

SEQ ID NO: 2708 - protein, 16 aa, synthetic construct
TINGHDSPHKTGQNQP

SEQ ID NO: 2709 - protein, 16 aa, synthetic construct
AINGHDSPHKSGQSPQ

SEQ ID NO: 2710 - protein, 16 aa, synthetic construct
TIKGNDSPHKSVQNQQ

SEQ ID NO: 2711 - protein, 16 aa, synthetic construct
TEFGHDSPHKSGQNQQ

SEQ ID NO: 2712 - protein, 16 aa, synthetic construct
TINGHDSPHKSAQNYQ

SEQ ID NO: 2713 - protein, 16 aa, synthetic construct
TFNGSASPHSKALNQQ

SEQ ID NO: 2714 - protein, 16 aa, synthetic construct
TINGHESPHKSAQNRQ

SEQ ID NO: 2715 - protein, 16 aa, synthetic construct
TTNGHDSPHKSGQNQQ

SEQ ID NO: 2716 - protein, 16 aa, synthetic construct
TIKGQDSPHKIGQNQQ

SEQ ID NO: 2717 - protein, 16 aa, synthetic construct
TVNGHDSPHKSGQNHL

SEQ ID NO: 2718 - protein, 16 aa, synthetic construct
SINGHDSPHKSGQYQH

SEQ ID NO: 2719 - protein, 16 aa, synthetic construct
TINGNDSPHKSVQNHQ

SEQ ID NO: 2720 - protein, 16 aa, synthetic construct
TITGHDSPHKSGQNQW

SEQ ID NO: 2721 - protein, 16 aa, synthetic construct
TNNGHDSPHKSVQNQH

SEQ ID NO: 2722 - protein, 16 aa, synthetic construct
TIDGHDSPHKSGQNQH

SEQ ID NO: 2723 - protein, 16 aa, synthetic construct
TVNGHDSPHKSGQTRQ

SEQ ID NO: 2724 - protein, 16 aa, synthetic construct
TVNGHDSPHKSGQNLH

SEQ ID NO: 2725 - protein, 16 aa, synthetic construct
AISGHDSPHKSGLNQQ

SEQ ID NO: 2726 - protein, 16 aa, synthetic construct
AINGHDSPHKSAQNQE

SEQ ID NO: 2727 - protein, 16 aa, synthetic construct
TITGHDSPHKSGQHLQ

SEQ ID NO: 2728 - protein, 16 aa, synthetic construct
TINGHDSPHKSRLNQP

SEQ ID NO: 2729 - protein, 16 aa, synthetic construct
TVDGHDSPHKSGQKQQ

SEQ ID NO: 2730 - protein, 16 aa, synthetic construct
TINGQDSPHKSGQNQD

SEQ ID NO: 2731 - protein, 16 aa, synthetic construct
TIEGHDSPHKSGRNQQ

SEQ ID NO: 2732 - protein, 16 aa, synthetic construct
TTNGHDSPHKSGQNLL

SEQ ID NO: 2733 - protein, 16 aa, synthetic construct
TINGHDSPHKSGQLVI

SEQ ID NO: 2734 - protein, 16 aa, synthetic construct
TVNGHDSPHKSRQSQQ

SEQ ID NO: 2735 - protein, 16 aa, synthetic construct
TINGHDSPHKSGRTQE

SEQ ID NO: 2736 - protein, 16 aa, synthetic construct
TINGHDSPHKSVQTHQ

SEQ ID NO: 2737 - protein, 16 aa, synthetic construct
TSNGHDSPHKSGQNQP

SEQ ID NO: 2738 - protein, 16 aa, synthetic construct
VINGHDSPHKSGQTQQ

SEQ ID NO: 2739 - protein, 16 aa, synthetic construct
TINGPDSPHKIGQNQQ

SEQ ID NO: 2740 - protein, 16 aa, synthetic construct
AVNGHDSPHKSVQNQQ

SEQ ID NO: 2741 - protein, 16 aa, synthetic construct
TINGHDSPHKSRQDQH

SEQ ID NO: 2742 - protein, 16 aa, synthetic construct
AINGPDSPHKSGQKQQ

SEQ ID NO: 2743 - protein, 16 aa, synthetic construct
TINGHDSPHKSRQSQH

SEQ ID NO: 2744 - protein, 16 aa, synthetic construct
TIYGHDSPHKSVQNQL

SEQ ID NO: 2745 - protein, 16 aa, synthetic construct
TVNGHDSPHKSGQNLL

SEQ ID NO: 2746 - protein, 16 aa, synthetic construct
TENKSGSPHSKAQNQQ

SEQ ID NO: 2747 - protein, 16 aa, synthetic construct
TTNGQDSPHKSGQNQQ

SEQ ID NO: 2748 - protein, 16 aa, synthetic construct
TDKGSGSPHSKAQNQQ

SEQ ID NO: 2749 - protein, 16 aa, synthetic construct
TIDGHDSPHKSGRNQQ

SEQ ID NO: 2750 - protein, 16 aa, synthetic construct
TINGYDSPHKSGQYQH

SEQ ID NO: 2751 - protein, 16 aa, synthetic construct
TDNGHDSPHKSRQNQQ

SEQ ID NO: 2752 - protein, 16 aa, synthetic construct
TINGHDSPHKSWVRQQ

SEQ ID NO: 2753 - protein, 16 aa, synthetic construct
TINGHESPHKSGQNQH

SEQ ID NO: 2754 - protein, 16 aa, synthetic construct
TVNGHDSPHKIGHNQQ

SEQ ID NO: 2755 - protein, 16 aa, synthetic construct
TCNGHDSPHKSGRNQQ

SEQ ID NO: 2756 - protein, 16 aa, synthetic construct
TINGNGSPHSKAQNHQ

SEQ ID NO: 2757 - protein, 16 aa, synthetic construct
NVVGHDSPHKSGQNQQ

SEQ ID NO: 2758 - protein, 16 aa, synthetic construct
TINGHDSPHKSNAWQQ

SEQ ID NO: 2759 - protein, 16 aa, synthetic construct
TDAGHDSPHKSGQNQQ

SEQ ID NO: 2760 - protein, 16 aa, synthetic construct
TEVGHDSPHKSGQNQQ

SEQ ID NO: 2761 - protein, 16 aa, synthetic construct
SELGHDSPHKSGQNQQ

SEQ ID NO: 2762 - protein, 16 aa, synthetic construct
TINGHDSPHKSGQSVP

SEQ ID NO: 2763 - protein, 16 aa, synthetic construct
TINGHESPHKSGQNIQ

SEQ ID NO: 2764 - protein, 16 aa, synthetic construct
TINGHDSPHKSVQNHL

SEQ ID NO: 2765 - protein, 16 aa, synthetic construct
TINGHDSPHKIGLDQQ

SEQ ID NO: 2766 - protein, 16 aa, synthetic construct
TSNASGSPHSKAQHQQ

SEQ ID NO: 2767 - protein, 16 aa, synthetic construct
TINGHDSPHKRGPDQQ

SEQ ID NO: 2768 - protein, 16 aa, synthetic construct
TINGMGSPHSKTQNQQ

SEQ ID NO: 2769 - protein, 16 aa, synthetic construct
TIKGHDSPHKSGESQQ

SEQ ID NO: 2770 - protein, 16 aa, synthetic construct
TINGHDSPHKHGQNHQ

SEQ ID NO: 2771 - protein, 16 aa, synthetic construct
TVNGTGSPHSKAQNQL

SEQ ID NO: 2772 - protein, 16 aa, synthetic construct
TIIGHDSPHKSGQYQH

SEQ ID NO: 2773 - protein, 16 aa, synthetic construct
TSNGHDSPHKSVQNKQ

SEQ ID NO: 2774 - protein, 16 aa, synthetic construct
IVNGQVSPHKSGQNQQ

SEQ ID NO: 2775 - protein, 16 aa, synthetic construct
TVNGHDSPHKSGQRQL

SEQ ID NO: 2776 - protein, 16 aa, synthetic construct
TVNGHDSPHKIGQNQL

SEQ ID NO: 2777 - protein, 16 aa, synthetic construct
TINGHDSPHKSGQIIV

SEQ ID NO: 2778 - protein, 16 aa, synthetic construct
IGNGHESPHKSGQNQQ

SEQ ID NO: 2779 - protein, 16 aa, synthetic construct
EVMGHDSPHKSGQNQQ

SEQ ID NO: 2780 - protein, 16 aa, synthetic construct
TINGYDSPHKSGQKQS

SEQ ID NO: 2781 - protein, 16 aa, synthetic construct
TIHGNGSPHSKAQNQE

SEQ ID NO: 2782 - protein, 16 aa, synthetic construct
YQVGHDSPHKSGQNQQ

SEQ ID NO: 2783 - protein, 16 aa, synthetic construct
TIKGDDSPHKSVQNQQ

SEQ ID NO: 2784 - protein, 16 aa, synthetic construct
TINGHDSPHKSVQSHQ

SEQ ID NO: 2785 - protein, 16 aa, synthetic construct
TINGHDSPHKSGQFVV

SEQ ID NO: 2786 - protein, 16 aa, synthetic construct
TVNGHDSPHKSRQNLQ

SEQ ID NO: 2787 - protein, 16 aa, synthetic construct
ATNGHNSPHKSGQNQE

SEQ ID NO: 2788 - protein, 16 aa, synthetic construct
AINGHDSPHKSAQNQQ

SEQ ID NO: 2789 - protein, 16 aa, synthetic construct
TEHGHDSPHKSGQNQQ

SEQ ID NO: 2790 - protein, 16 aa, synthetic construct
TIYGHDSPHKSGQSQP

SEQ ID NO: 2791 - protein, 16 aa, synthetic construct
TISGHESPHKSGQNEQ

SEQ ID NO: 2792 - protein, 16 aa, synthetic construct
AIIGHDSPHKSAQNQQ

SEQ ID NO: 2793 - protein, 16 aa, synthetic construct
AIDGHDSPHKSGQNQL

SEQ ID NO: 2794 - protein, 16 aa, synthetic construct
TIMGHDSPHKSVQNQQ

SEQ ID NO: 2795 - protein, 16 aa, synthetic construct
EVGGHDSPHKSGQNQQ

SEQ ID NO: 2796 - protein, 16 aa, synthetic construct
TINGHDSPHKSAQNLL

SEQ ID NO: 2797 - protein, 16 aa, synthetic construct
TINASGSPHSKAINQQ

SEQ ID NO: 2798 - protein, 16 aa, synthetic construct
AINGNGSPHKRGQNQQ

SEQ ID NO: 2799 - protein, 16 aa, synthetic construct
SEMGHDSPHKSGQNQQ

SEQ ID NO: 2800 - protein, 16 aa, synthetic construct
AQQGHDSPHKSGQNQQ

SEQ ID NO: 2801 - protein, 16 aa, synthetic construct
AINGHDSPHKSGQSLQ

SEQ ID NO: 2802 - protein, 16 aa, synthetic construct
TINGSGSPHSKAPNQQ

SEQ ID NO: 2803 - protein, 16 aa, synthetic construct
CGEGHDSPHKSGQNQQ

SEQ ID NO: 2804 - protein, 16 aa, synthetic construct
TVNGHDSPHKSAQNHQ

SEQ ID NO: 2805 - protein, 16 aa, synthetic construct
TVNGHDSPHKSGQTQL

SEQ ID NO: 2806 - protein, 16 aa, synthetic construct
TNNGHDSPHKSGRNRQ

SEQ ID NO: 2807 - protein, 16 aa, synthetic construct
TINGHDSPHKYGQNEQ

SEQ ID NO: 2808 - protein, 16 aa, synthetic construct
TINGNGSPHSKAPNLQ

SEQ ID NO: 2809 - protein, 16 aa, synthetic construct
SINGHDSPHKSQQNQQ

SEQ ID NO: 2810 - protein, 16 aa, synthetic construct
TIGGHDSPHKSGQNQQ

SEQ ID NO: 2811 - protein, 16 aa, synthetic construct
TINGHDSPHKSVQSKQ

SEQ ID NO: 2812 - protein, 16 aa, synthetic construct
ELVGHDSPHKSGQNQQ

SEQ ID NO: 2813 - protein, 16 aa, synthetic construct
ELMGHDSPHKSGQNQQ

SEQ ID NO: 2814 - protein, 16 aa, synthetic construct
TINGNDSPHKIGHNQQ

SEQ ID NO: 2815 - protein, 16 aa, synthetic construct
TIKGGGSPHSKAQDQQ

SEQ ID NO: 2816 - protein, 16 aa, synthetic construct
TVNGHDSPHKSGQTQQ

SEQ ID NO: 2817 - protein, 16 aa, synthetic construct
TINGQDSPHKSGQNPL

SEQ ID NO: 2818 - protein, 16 aa, synthetic construct
TVNASGSPHSKAQNHQ

SEQ ID NO: 2819 - protein, 16 aa, synthetic construct
TINGHDSPHKSGRDQK

SEQ ID NO: 2820 - protein, 16 aa, synthetic construct
TINGHDSPHKSVHNQQ

SEQ ID NO: 2821 - protein, 16 aa, synthetic construct
TINGHDSPHKSGQWKR

SEQ ID NO: 2822 - protein, 16 aa, synthetic construct
TIDGSGSPHSKAENRQ

SEQ ID NO: 2823 - protein, 16 aa, synthetic construct
NEIGHDSPHKSGQNQQ

SEQ ID NO: 2824 - protein, 16 aa, synthetic construct
AINGHDSPHKSGQSQQ

SEQ ID NO: 2825 - protein, 16 aa, synthetic construct
IINGHDSPHKSRQAQQ

SEQ ID NO: 2826 - protein, 16 aa, synthetic construct
TPNGHDSPHKSGQNQQ

SEQ ID NO: 2827 - protein, 16 aa, synthetic construct
ITNGHDSPHKSGQTQQ

SEQ ID NO: 2828 - protein, 16 aa, synthetic construct
TINGHDSPHKSVQNHQ

SEQ ID NO: 2829 - protein, 16 aa, synthetic construct
TINGHDSPHKSKQNQQ

SEQ ID NO: 2830 - protein, 16 aa, synthetic construct
TINGHDSPHKSAQNQL

SEQ ID NO: 2831 - protein, 16 aa, synthetic construct
TVNGHDSPHKSGQTQP

SEQ ID NO: 2832 - protein, 16 aa, synthetic construct
TDQGHDSPHKSGQNQQ

SEQ ID NO: 2833 - protein, 16 aa, synthetic construct
TINGHDSPHKLWINQQ

SEQ ID NO: 2834 - protein, 16 aa, synthetic construct
GINGPDSPHKSGQNQQ

SEQ ID NO: 2835 - protein, 16 aa, synthetic construct
SEIGHDSPHKSGQNQQ

SEQ ID NO: 2836 - protein, 16 aa, synthetic construct
TINGHDSPHKSVQKQL

SEQ ID NO: 2837 - protein, 16 aa, synthetic construct
TINGHPSPHWKGQNQQ

SEQ ID NO: 2838 - protein, 16 aa, synthetic construct
TVNGHDSPHKSGRNQL

SEQ ID NO: 2839 - protein, 16 aa, synthetic construct
TIKGSGSPHSKVQDQQ

SEQ ID NO: 2840 - protein, 16 aa, synthetic construct
SEKGHDSPHKSGQNQQ

SEQ ID NO: 2841 - protein, 16 aa, synthetic construct
WSAGHDSPHKSGQNQQ

SEQ ID NO: 2842 - protein, 16 aa, synthetic construct
ELAGHDSPHKSGQNQQ

SEQ ID NO: 2843 - protein, 16 aa, synthetic construct
TINGHDSPHKMGRNQQ

SEQ ID NO: 2844 - protein, 16 aa, synthetic construct
TINGHDSPHKSGISIQ

SEQ ID NO: 2845 - protein, 16 aa, synthetic construct
TSNGHDSPHKSVQNLQ

SEQ ID NO: 2846 - protein, 16 aa, synthetic construct
QTQGHDSPHKSGQNQQ

SEQ ID NO: 2847 - protein, 16 aa, synthetic construct
TINGHDSPHKMAHNQQ

SEQ ID NO: 2848 - protein, 16 aa, synthetic construct
AINGSGSPHSKAQTQQ

SEQ ID NO: 2849 - protein, 16 aa, synthetic construct
TINGHDSPHKHGQNQQ

SEQ ID NO: 2850 - protein, 16 aa, synthetic construct
GADGHDSPHKSGQNQQ

SEQ ID NO: 2851 - protein, 16 aa, synthetic construct
VGEGHDSPHKSGQNQQ

SEQ ID NO: 2852 - protein, 16 aa, synthetic construct
ANEGHDSPHKSGQNQQ

SEQ ID NO: 2853 - protein, 16 aa, synthetic construct
TEAKSGSPHSKAQNQQ

SEQ ID NO: 2854 - protein, 16 aa, synthetic construct
TINGHDSPHKSVQSQQ

SEQ ID NO: 2855 - protein, 16 aa, synthetic construct
TIPGSGSPHSKAQNLQ

SEQ ID NO: 2856 - protein, 16 aa, synthetic construct
TINGHDSPHKSGQTVC

SEQ ID NO: 2857 - protein, 16 aa, synthetic construct
ELRGHDSPHKSGQNQQ

SEQ ID NO: 2858 - protein, 16 aa, synthetic construct
CQIGHDSPHKSGQNQQ

SEQ ID NO: 2859 - protein, 16 aa, synthetic construct
GVMGHDSPHKSGQNQQ

SEQ ID NO: 2860 - protein, 16 aa, synthetic construct
ACDGHDSPHKSGQNQQ

SEQ ID NO: 2861 - protein, 16 aa, synthetic construct
TINGQDSPHKSGQYQQ

SEQ ID NO: 2862 - protein, 16 aa, synthetic construct
TINGHDSPHKSGQQIM

SEQ ID NO: 2863 - protein, 16 aa, synthetic construct
TINGHDSPHKSRQNEQ

SEQ ID NO: 2864 - protein, 16 aa, synthetic construct
ASNGHDSPHKSGLNHQ

SEQ ID NO: 2865 - protein, 16 aa, synthetic construct
TVNGHDSPHKSGQSQP

SEQ ID NO: 2866 - protein, 16 aa, synthetic construct
NELGHDSPHKSGQNQQ

SEQ ID NO: 2867 - protein, 16 aa, synthetic construct
AAEGHDSPHKSGQNQQ

SEQ ID NO: 2868 - protein, 16 aa, synthetic construct
GQNGHDSPHKSGQNQQ

SEQ ID NO: 2869 - protein, 16 aa, synthetic construct
NEFGHDSPHKSGQNQQ

SEQ ID NO: 2870 - protein, 16 aa, synthetic construct
TSIGYDSPHKSGQNQQ

SEQ ID NO: 2871 - protein, 16 aa, synthetic construct
TDNGHDSPHKSGQNLQ

SEQ ID NO: 2872 - protein, 16 aa, synthetic construct
TITGHDSPHKSRQDQQ

SEQ ID NO: 2873 - protein, 16 aa, synthetic construct
AEHGHDSPHKSGQNQQ

SEQ ID NO: 2874 - protein, 16 aa, synthetic construct
TINGDDSPHKSGQKQL

SEQ ID NO: 2875 - protein, 16 aa, synthetic construct
EILGHDSPHKSGQNQQ

SEQ ID NO: 2876 - protein, 16 aa, synthetic construct
TIHGSGSPHSKAQNQA

SEQ ID NO: 2877 - protein, 16 aa, synthetic construct
AINGDDSPHKSGHNQQ

SEQ ID NO: 2878 - protein, 16 aa, synthetic construct
TSNGHNSPHKSGQNQE

SEQ ID NO: 2879 - protein, 16 aa, synthetic construct
TINGHDSPHKSGQMIH

SEQ ID NO: 2880 - protein, 16 aa, synthetic construct
NAIGHDSPHKSGQNQQ

SEQ ID NO: 2881 - protein, 16 aa, synthetic construct
VINGHDSPHKSGRNHQ

SEQ ID NO: 2882 - protein, 16 aa, synthetic construct
TITGHDSPHKSVQNRQ

SEQ ID NO: 2883 - protein, 16 aa, synthetic construct
TINGHDSPHKSGQKMN

SEQ ID NO: 2884 - protein, 16 aa, synthetic construct
TIHGHDSPHKSGQSQQ

SEQ ID NO: 2885 - protein, 16 aa, synthetic construct
TEIGHDSPHKSGQNQQ

SEQ ID NO: 2886 - protein, 16 aa, synthetic construct
TINGHDSPHKSGQYQH

SEQ ID NO: 2887 - protein, 14 aa, synthetic construct
GSGSPHSKAQNRHT

SEQ ID NO: 2888 - protein, 14 aa, synthetic construct
GSGSPHSKVQNQQT

SEQ ID NO: 2889 - protein, 14 aa, synthetic construct
MSGSPHSKAQNQQT

SEQ ID NO: 2890 - protein, 14 aa, synthetic construct
GSGSPHSKARDQQT

SEQ ID NO: 2891 - protein, 14 aa, synthetic construct
GSGSPHSKAPNLQT

SEQ ID NO: 2892 - protein, 14 aa, synthetic construct
TSGSPHSKAQNQQT

SEQ ID NO: 2893 - protein, 14 aa, synthetic construct
GSGSPHSKAHVRQT

SEQ ID NO: 2894 - protein, 14 aa, synthetic construct
GSGSPHSKAPNQHT

SEQ ID NO: 2895 - protein, 14 aa, synthetic construct
ISGSPHSKAQNQQT

SEQ ID NO: 2896 - protein, 14 aa, synthetic construct
GSGSPHSKTQSQQT

SEQ ID NO: 2897 - protein, 4 aa, synthetic construct
KCGE

SEQ ID NO: 2898 - protein, 14 aa, synthetic construct
ESGSPHSKAQNQQI

SEQ ID NO: 2899 - protein, 14 aa, synthetic construct
GSGSPHSKAQPAKT

SEQ ID NO: 2900 - protein, 14 aa, synthetic construct
SSGSPHSKAQNQQT

SEQ ID NO: 2901 - protein, 14 aa, synthetic construct
GSGSPHSKSQTQQN

SEQ ID NO: 2902 - protein, 14 aa, synthetic construct
ASGSPHSKAQNQQT

SEQ ID NO: 2903 - protein, 14 aa, synthetic construct
GSGSPHSKAQNLAT

SEQ ID NO: 2904 - protein, 14 aa, synthetic construct
GSGSPHSKSQNQLT

SEQ ID NO: 2905 - protein, 14 aa, synthetic construct
NSGSPHSKAQNQQT

SEQ ID NO: 2906 - protein, 14 aa, synthetic construct
GSGSPHSKAQGQQT

SEQ ID NO: 2907 - protein, 4 aa, synthetic construct
KASN

SEQ ID NO: 2908 - protein, 14 aa, synthetic construct
GSGSPHSKALNRQS

SEQ ID NO: 2909 - protein, 14 aa, synthetic construct
LSGSPHSKAQNQQT

SEQ ID NO: 2910 - protein, 14 aa, synthetic construct
GSGSPHSKAHNQQT

SEQ ID NO: 2911 - protein, 14 aa, synthetic construct
GSGSPHSKTQNQQT

SEQ ID NO: 2912 - protein, 14 aa, synthetic construct
GSGSPHSKAQNPPT

SEQ ID NO: 2913 - protein, 14 aa, synthetic construct
GSGSPHSKAQNLQT

SEQ ID NO: 2914 - protein, 14 aa, synthetic construct
GSGSPHSKAQYQQT

SEQ ID NO: 2915 - protein, 14 aa, synthetic construct
GSGSPHSKAQDQET

SEQ ID NO: 2916 - protein, 14 aa, synthetic construct
KSGSPHSKAQNQQT

SEQ ID NO: 2917 - protein, 4 aa, synthetic construct
KTIG

SEQ ID NO: 2918 - protein, 14 aa, synthetic construct
GSGSPHSKAQDQQT

SEQ ID NO: 2919 - protein, 14 aa, synthetic construct
GSGSPHSKGHWQQT

SEQ ID NO: 2920 - protein, 14 aa, synthetic construct
GSGSPHSKAPNQQT

SEQ ID NO: 2921 - protein, 14 aa, synthetic construct
GSGSPHSKAQNQLI

SEQ ID NO: 2922 - protein, 14 aa, synthetic construct
GSGSPHSKRPEQQT

SEQ ID NO: 2923 - protein, 14 aa, synthetic construct
GSGSPHSKAQRTMT

SEQ ID NO: 2924 - protein, 14 aa, synthetic construct
GSGSPHSKAQNQQH

SEQ ID NO: 2925 - protein, 14 aa, synthetic construct
HSGSPHSKAQNQQT

SEQ ID NO: 2926 - protein, 14 aa, synthetic construct
GSGSPHSKALHQHT

SEQ ID NO: 2927 - protein, 14 aa, synthetic construct
GSGSPHSKAQHRIT

SEQ ID NO: 2928 - protein, 14 aa, synthetic construct
GSGSPHSKAQYIHT

SEQ ID NO: 2929 - protein, 14 aa, synthetic construct
GSGSPHSKAQKFET

SEQ ID NO: 2930 - protein, 14 aa, synthetic construct
ESGSPHSKAQNHQT

SEQ ID NO: 2931 - protein, 14 aa, synthetic construct
GSGSPHSKAQFPST

SEQ ID NO: 2932 - protein, 14 aa, synthetic construct
PSGSPHSKAQNQQT

SEQ ID NO: 2933 - protein, 14 aa, synthetic construct
GSGSPHSKAHNQQR

SEQ ID NO: 2934 - protein, 14 aa, synthetic construct
GSGSPHSKAQAIKT

SEQ ID NO: 2935 - protein, 14 aa, synthetic construct
GSGSPHSKGQNRQT

SEQ ID NO: 2936 - protein, 14 aa, synthetic construct
GSGSPHSKAQSQQT

SEQ ID NO: 2937 - protein, 14 aa, synthetic construct
ASGSPHSKAQNQLT

SEQ ID NO: 2938 - protein, 14 aa, synthetic construct
RSGSPHSKAQNQQT

SEQ ID NO: 2939 - protein, 14 aa, synthetic construct
GSGSPHSKAQYQHT

SEQ ID NO: 2940 - protein, 14 aa, synthetic construct
GSGSPHTKAQNPQS

SEQ ID NO: 2941 - protein, 14 aa, synthetic construct
GSGSPHSKGQNPPT

SEQ ID NO: 2942 - protein, 14 aa, synthetic construct
GSGSPHSKAQHQLT

SEQ ID NO: 2943 - protein, 14 aa, synthetic construct
GSGSPHSKAQSPPT

SEQ ID NO: 2944 - protein, 14 aa, synthetic construct
GSGSPHSKAQAKLT

SEQ ID NO: 2945 - protein, 14 aa, synthetic construct
GSGSPHSKTKSQQT

SEQ ID NO: 2946 - protein, 14 aa, synthetic construct
GSGSPHSKAQDRPT

SEQ ID NO: 2947 - protein, 14 aa, synthetic construct
GSGSPHSKAQSQQL

SEQ ID NO: 2948 - protein, 14 aa, synthetic construct
GSGSPHSKAQAFHT

SEQ ID NO: 2949 - protein, 14 aa, synthetic construct
GSGSPHSKAQKQQD

SEQ ID NO: 2950 - protein, 14 aa, synthetic construct
GSGSPHSKAQNAQT

SEQ ID NO: 2951 - protein, 14 aa, synthetic construct
WSGSPHSKAQNQQT

SEQ ID NO: 2952 - protein, 14 aa, synthetic construct
GSGSPHSKAHNQLT

SEQ ID NO: 2953 - protein, 14 aa, synthetic construct
GSGSPHSKAQNQQY

SEQ ID NO: 2954 - protein, 14 aa, synthetic construct
GSGSPHSKAQKLNT

SEQ ID NO: 2955 - protein, 14 aa, synthetic construct
GSGSPHSKSQNVQT

SEQ ID NO: 2956 - protein, 14 aa, synthetic construct
GSGSPHSKAQAQQT

SEQ ID NO: 2957 - protein, 14 aa, synthetic construct
GSGSPHSKAQNLQA

SEQ ID NO: 2958 - protein, 14 aa, synthetic construct
DSGSPHSKAQNQQT

SEQ ID NO: 2959 - protein, 14 aa, synthetic construct
ASGSPHSKAPNQQT

SEQ ID NO: 2960 - protein, 14 aa, synthetic construct
GSGSPHSKAQTPPT

SEQ ID NO: 2961 - protein, 14 aa, synthetic construct
GSGSPHSKAQYQHA

SEQ ID NO: 2962 - protein, 14 aa, synthetic construct
GSGSPHSKAQGQQA

SEQ ID NO: 2963 - protein, 14 aa, synthetic construct
GSGSPHNKAQNHQT

SEQ ID NO: 2964 - protein, 14 aa, synthetic construct
GSGSPHSKAQPPAT

SEQ ID NO: 2965 - protein, 14 aa, synthetic construct
GSGSPHSKAQERPT

SEQ ID NO: 2966 - protein, 14 aa, synthetic construct
GSGSPHSKAQDLQT

SEQ ID NO: 2967 - protein, 14 aa, synthetic construct
GSGSPHSKAQAMHT

SEQ ID NO: 2968 - protein, 14 aa, synthetic construct
GSGSPHSKALNQQT

SEQ ID NO: 2969 - protein, 14 aa, synthetic construct
GSGSPHSKAQHPST

SEQ ID NO: 2970 - protein, 14 aa, synthetic construct
GSGSPHSKAPGLQT

SEQ ID NO: 2971 - protein, 14 aa, synthetic construct
GSGSPHSKAQGIRT

SEQ ID NO: 2972 - protein, 14 aa, synthetic construct
GSGSPHSKAQAPAT

SEQ ID NO: 2973 - protein, 14 aa, synthetic construct
GSGSPHSKSQSQQI

SEQ ID NO: 2974 - protein, 14 aa, synthetic construct
GSGSPHSKAQIPPT

SEQ ID NO: 2975 - protein, 14 aa, synthetic construct
GSGSPHSKAQTQLT

SEQ ID NO: 2976 - protein, 14 aa, synthetic construct
GSGSPHSKAQAPST

SEQ ID NO: 2977 - protein, 14 aa, synthetic construct
GSGSPHSKGQNQQT

SEQ ID NO: 2978 - protein, 14 aa, synthetic construct
ASGSPHSKAHNQQT

SEQ ID NO: 2979 - protein, 14 aa, synthetic construct
GSGSPHSKAQNTYA

SEQ ID NO: 2980 - protein, 14 aa, synthetic construct
GSGSPHSKSQNQHI

SEQ ID NO: 2981 - protein, 14 aa, synthetic construct
GSGSPHSKAQNHLT

SEQ ID NO: 2982 - protein, 14 aa, synthetic construct
GSGSPHSKAQIGMT

SEQ ID NO: 2983 - protein, 14 aa, synthetic construct
GSGSPHSKALNKQT

SEQ ID NO: 2984 - protein, 14 aa, synthetic construct
GSGSPHSKAQLQQT

SEQ ID NO: 2985 - protein, 14 aa, synthetic construct
GSGSPHSKAQRMST

SEQ ID NO: 2986 - protein, 14 aa, synthetic construct
GSGSPHSKAQGILT

SEQ ID NO: 2987 - protein, 14 aa, synthetic construct
GSGSPHSKAQDRQT

SEQ ID NO: 2988 - protein, 14 aa, synthetic construct
GSGSPHSKARDWQT

SEQ ID NO: 2989 - protein, 14 aa, synthetic construct
GSGSPHSKAQNTHD

SEQ ID NO: 2990 - protein, 14 aa, synthetic construct
GSGSPHSKAPNLQI

SEQ ID NO: 2991 - protein, 14 aa, synthetic construct
GSGSPHSKAQERST

SEQ ID NO: 2992 - protein, 14 aa, synthetic construct
GSGSPHSKAQNYQT

SEQ ID NO: 2993 - protein, 14 aa, synthetic construct
GSGSPHSKAQRTCT

SEQ ID NO: 2994 - protein, 14 aa, synthetic construct
GSGSPHSKAQIGHT

SEQ ID NO: 2995 - protein, 14 aa, synthetic construct
GSGSPHSKAQGAIT

SEQ ID NO: 2996 - protein, 14 aa, synthetic construct
GSGSPHSKAQVPPT

SEQ ID NO: 2997 - protein, 14 aa, synthetic construct
GSGSPHSKAQVQQI

SEQ ID NO: 2998 - protein, 14 aa, synthetic construct
GSGSPHSKALMRQT

SEQ ID NO: 2999 - protein, 14 aa, synthetic construct
GSGSPHSKAQYSVT

SEQ ID NO: 3000 - protein, 14 aa, synthetic construct
GSGSPHSKVPNLQT

SEQ ID NO: 3001 - protein, 14 aa, synthetic construct
GSGSPHSKAQSQQI

SEQ ID NO: 3002 - protein, 14 aa, synthetic construct
GSGSPHSKAQAITT

SEQ ID NO: 3003 - protein, 14 aa, synthetic construct
GSGSPHSKAQKTLT

SEQ ID NO: 3004 - protein, 14 aa, synthetic construct
GSGSPHSKAQNQWT

SEQ ID NO: 3005 - protein, 14 aa, synthetic construct
GSGSPHSKAQLHHT

SEQ ID NO: 3006 - protein, 14 aa, synthetic construct
GSGSPHSKAQNIII

SEQ ID NO: 3007 - protein, 14 aa, synthetic construct
GSGSPHSKAQGHHT

SEQ ID NO: 3008 - protein, 14 aa, synthetic construct
GSGSPHSKAQSKVT

SEQ ID NO: 3009 - protein, 14 aa, synthetic construct
GSGSPHSKAQLPST

SEQ ID NO: 3010 - protein, 14 aa, synthetic construct
GSGSPHSKAIGKQT

SEQ ID NO: 3011 - protein, 14 aa, synthetic construct
GSGSPHSKAQAIHT

SEQ ID NO: 3012 - protein, 14 aa, synthetic construct
GSGSPHSKAQHGLT

SEQ ID NO: 3013 - protein, 14 aa, synthetic construct
GSGSPHSKAQFMCT

SEQ ID NO: 3014 - protein, 14 aa, synthetic construct
VSGSPHSKAQGQQT

SEQ ID NO: 3015 - protein, 14 aa, synthetic construct
GSGSPHSKAQHLQT

SEQ ID NO: 3016 - protein, 14 aa, synthetic construct
GSGSPHSKTQNHQN

SEQ ID NO: 3017 - protein, 14 aa, synthetic construct
GSGSPHSKAQPART

SEQ ID NO: 3018 - protein, 14 aa, synthetic construct
GSGSPHSKAQSLQT

SEQ ID NO: 3019 - protein, 14 aa, synthetic construct
GSGSPHSKSQSQLT

SEQ ID NO: 3020 - protein, 14 aa, synthetic construct
GSGSPHSKAQDRQS

SEQ ID NO: 3021 - protein, 14 aa, synthetic construct
GSGSPHSKAQMPST

SEQ ID NO: 3022 - protein, 14 aa, synthetic construct
GSGSPHSKAQGSLT

SEQ ID NO: 3023 - protein, 14 aa, synthetic construct
GSGSPHSKSQNQQT

SEQ ID NO: 3024 - protein, 14 aa, synthetic construct
GSGSPHSKAQVPAT

SEQ ID NO: 3025 - protein, 14 aa, synthetic construct
GSGSPHSKAQDKQT

SEQ ID NO: 3026 - protein, 14 aa, synthetic construct
GSGSPHSKAHYQQT

SEQ ID NO: 3027 - protein, 14 aa, synthetic construct
GSGSPHSKAQVPST

SEQ ID NO: 3028 - protein, 14 aa, synthetic construct
GSGSPHSKARGEQT

SEQ ID NO: 3029 - protein, 14 aa, synthetic construct
GSGSPHSKAPGQQT

SEQ ID NO: 3030 - protein, 14 aa, synthetic construct
GSGSPHSKAQSLQI

SEQ ID NO: 3031 - protein, 14 aa, synthetic construct
GSGSPHSKRLEQQT

SEQ ID NO: 3032 - protein, 14 aa, synthetic construct
GSGSPHSKAQNQST

SEQ ID NO: 3033 - protein, 14 aa, synthetic construct
GSGSPHSKAQKVIT

SEQ ID NO: 3034 - protein, 14 aa, synthetic construct
GSGSPHSKAQNNDQ

SEQ ID NO: 3035 - protein, 14 aa, synthetic construct
GSGSPHSKAQSVHT

SEQ ID NO: 3036 - protein, 14 aa, synthetic construct
GSGSPHSKAQPLGT

SEQ ID NO: 3037 - protein, 14 aa, synthetic construct
GSGSPHSKAHNQET

SEQ ID NO: 3038 - protein, 14 aa, synthetic construct
GSGSPHSKAQNLQI

SEQ ID NO: 3039 - protein, 14 aa, synthetic construct
GSGSPHSKAQIQQT

SEQ ID NO: 3040 - protein, 14 aa, synthetic construct
GSGSPHSKAQVRNT

SEQ ID NO: 3041 - protein, 14 aa, synthetic construct
GSGSPHSKAPSNQT

SEQ ID NO: 3042 - protein, 14 aa, synthetic construct
GSGSPHSKAQVGHT

SEQ ID NO: 3043 - protein, 14 aa, synthetic construct
GSGSPHSKAQRDIT

SEQ ID NO: 3044 - protein, 14 aa, synthetic construct
GSGSPHSKAQMPNT

SEQ ID NO: 3045 - protein, 14 aa, synthetic construct
GSGSPHSKARGLQT

SEQ ID NO: 3046 - protein, 14 aa, synthetic construct
GSGSPHSKLQKQQT

SEQ ID NO: 3047 - protein, 14 aa, synthetic construct
GSGSPHSKAPSLQT

SEQ ID NO: 3048 - protein, 14 aa, synthetic construct
GSGSPHSKAQRDQT

SEQ ID NO: 3049 - protein, 14 aa, synthetic construct
GSGSPHSKNRDQQT

SEQ ID NO: 3050 - protein, 14 aa, synthetic construct
GSGSPHSKAQAKGT

SEQ ID NO: 3051 - protein, 14 aa, synthetic construct
GSGSPHSKAQSAHT

SEQ ID NO: 3052 - protein, 14 aa, synthetic construct
GSGSPHSKSQNHQT

SEQ ID NO: 3053 - protein, 14 aa, synthetic construct
RSGSPHSKAQDQQT

SEQ ID NO: 3054 - protein, 14 aa, synthetic construct
GSGSPHSKAQSTMT

SEQ ID NO: 3055 - protein, 14 aa, synthetic construct
GSGSPHSKAQREMT

SEQ ID NO: 3056 - protein, 14 aa, synthetic construct
GSGSPHSKAQYRAT

SEQ ID NO: 3057 - protein, 14 aa, synthetic construct
GSGSPHSKNQWQQT

SEQ ID NO: 3058 - protein, 14 aa, synthetic construct
GSGSPHSKAQRMNT

SEQ ID NO: 3059 - protein, 14 aa, synthetic construct
GSGSPHAKAQNHQT

SEQ ID NO: 3060 - protein, 14 aa, synthetic construct
GSGSPHSKAGDSQT

SEQ ID NO: 3061 - protein, 14 aa, synthetic construct
GSGSPHSKLKSQQT

SEQ ID NO: 3062 - protein, 14 aa, synthetic construct
GSGSPHSKAQKIST

SEQ ID NO: 3063 - protein, 14 aa, synthetic construct
GSGSPHSKAPSMQT

SEQ ID NO: 3064 - protein, 14 aa, synthetic construct
GSGSPHSKASPRQT

SEQ ID NO: 3065 - protein, 14 aa, synthetic construct
GSGSPHSKRMEQQT

SEQ ID NO: 3066 - protein, 14 aa, synthetic construct
GSGSPHSKAQYQNT

SEQ ID NO: 3067 - protein, 14 aa, synthetic construct
RSGSPHSKAQNQQI

SEQ ID NO: 3068 - protein, 14 aa, synthetic construct
GSGSPHTKAQNPPT

SEQ ID NO: 3069 - protein, 14 aa, synthetic construct
GSGSPHTKAQNQQT

SEQ ID NO: 3070 - protein, 14 aa, synthetic construct
ASGSPHSKAQHQQT

SEQ ID NO: 3071 - protein, 14 aa, synthetic construct
ASGSPHSKAINQQT

SEQ ID NO: 3072 - protein, 14 aa, synthetic construct
GSGSPHSKAPNQQH

SEQ ID NO: 3073 - protein, 14 aa, synthetic construct
ASGSPHSKAQNHQT

SEQ ID NO: 3074 - protein, 14 aa, synthetic construct
GSGSPHSKAENRQT

SEQ ID NO: 3075 - protein, 14 aa, synthetic construct
GSGSPHSKVQDQQT

SEQ ID NO: 3076 - protein, 14 aa, synthetic construct
GSGSPHSKAQTQQA

SEQ ID NO: 3077 - protein, 14 aa, synthetic construct
GSGSPHSKAQNQAT

SEQ ID NO: 3078 - protein, 14 aa, synthetic construct
GHDSPHKSGQIRQT

SEQ ID NO: 3079 - protein, 14 aa, synthetic construct
GHDSPHKIGQNQHA

SEQ ID NO: 3080 - protein, 14 aa, synthetic construct
GYDSPHKSGQKQQT

SEQ ID NO: 3081 - protein, 4 aa, synthetic construct
KTDP

SEQ ID NO: 3082 - protein, 14 aa, synthetic construct
GHDSPHKSGQSVQT

SEQ ID NO: 3083 - protein, 14 aa, synthetic construct
GHESPHKSGRSQQT

SEQ ID NO: 3084 - protein, 14 aa, synthetic construct
GHDSPHKSGQNKLE

SEQ ID NO: 3085 - protein, 14 aa, synthetic construct
GHDSPHKTGQNQQK

SEQ ID NO: 3086 - protein, 14 aa, synthetic construct
GRGSPHKRGQNQQT

SEQ ID NO: 3087 - protein, 14 aa, synthetic construct
GHDNPHKSGQNQQT

SEQ ID NO: 3088 - protein, 14 aa, synthetic construct
GQDSPHKSGQHQQA

SEQ ID NO: 3089 - protein, 14 aa, synthetic construct
GHDSPHKSGQIQHT

SEQ ID NO: 3090 - protein, 14 aa, synthetic construct
GHDSPHKSGPRQQT

SEQ ID NO: 3091 - protein, 14 aa, synthetic construct
GHDSPHKSGHTQQT

SEQ ID NO: 3092 - protein, 14 aa, synthetic construct
GHDSPHKSGQRQHT

SEQ ID NO: 3093 - protein, 14 aa, synthetic construct
GHDSPHKSAQSQQT

SEQ ID NO: 3094 - protein, 14 aa, synthetic construct
GHESPHKSGQNQQS

SEQ ID NO: 3095 - protein, 14 aa, synthetic construct
GHDSPHKSLQNQQT

SEQ ID NO: 3096 - protein, 14 aa, synthetic construct
GHDSPHKSGRNQET

SEQ ID NO: 3097 - protein, 14 aa, synthetic construct
GHDSPHKSGQTQLT

SEQ ID NO: 3098 - protein, 14 aa, synthetic construct
GHDSPHKSEKNQQT

SEQ ID NO: 3099 - protein, 14 aa, synthetic construct
GRDSPHKSGQDQQT

SEQ ID NO: 3100 - protein, 14 aa, synthetic construct
GHDSPHKTGHNQQT

SEQ ID NO: 3101 - protein, 14 aa, synthetic construct
AHDSPHKSGQNQLT

SEQ ID NO: 3102 - protein, 14 aa, synthetic construct
GYDSPHKSGQTQQT

SEQ ID NO: 3103 - protein, 14 aa, synthetic construct
GHESPHKSGQTQQI

SEQ ID NO: 3104 - protein, 14 aa, synthetic construct
GHDSPHKSGQSKQA

SEQ ID NO: 3105 - protein, 14 aa, synthetic construct
GHESPHKSGQNQQT

SEQ ID NO: 3106 - protein, 14 aa, synthetic construct
GHDSPHKTGQNQPP

SEQ ID NO: 3107 - protein, 14 aa, synthetic construct
GHDSPHKSGQSPQT

SEQ ID NO: 3108 - protein, 14 aa, synthetic construct
GNDSPHKSVQNQQT

SEQ ID NO: 3109 - protein, 14 aa, synthetic construct
GHDSPHKSAQNYQT

SEQ ID NO: 3110 - protein, 14 aa, synthetic construct
AHDSPHKIGQNHQT

SEQ ID NO: 3111 - protein, 14 aa, synthetic construct
GHESPHKSAQNRQT

SEQ ID NO: 3112 - protein, 14 aa, synthetic construct
GHDSPHKSGQNQQG

SEQ ID NO: 3113 - protein, 14 aa, synthetic construct
GQDSPHKIGQNQQT

SEQ ID NO: 3114 - protein, 14 aa, synthetic construct
GHDSPHKSGQNHLT

SEQ ID NO: 3115 - protein, 14 aa, synthetic construct
GHDSPHKSGQYQHT

SEQ ID NO: 3116 - protein, 14 aa, synthetic construct
GNDSPHKSVQNHQT

SEQ ID NO: 3117 - protein, 14 aa, synthetic construct
GHDSPHKSGQNQWT

SEQ ID NO: 3118 - protein, 14 aa, synthetic construct
GHDSPHKSVQNQHT

SEQ ID NO: 3119 - protein, 14 aa, synthetic construct
GHDSPHKSGQNQHA

SEQ ID NO: 3120 - protein, 14 aa, synthetic construct
GHDSPHKSGQTRQT

SEQ ID NO: 3121 - protein, 14 aa, synthetic construct
GHDSPHKSGQNLHT

SEQ ID NO: 3122 - protein, 14 aa, synthetic construct
GHDSPHKSGLNQQT

SEQ ID NO: 3123 - protein, 14 aa, synthetic construct
GHDSPHKSAQNQET

SEQ ID NO: 3124 - protein, 14 aa, synthetic construct
GHDSPHKSGQHLQT

SEQ ID NO: 3125 - protein, 14 aa, synthetic construct
GHDSPHKSRLNQPT

SEQ ID NO: 3126 - protein, 14 aa, synthetic construct
GHDSPHKSGQKQQT

SEQ ID NO: 3127 - protein, 14 aa, synthetic construct
GQDSPHKSGQNQDT

SEQ ID NO: 3128 - protein, 14 aa, synthetic construct
GHDSPHKSGRNQQT

SEQ ID NO: 3129 - protein, 14 aa, synthetic construct
GHDSPHKSGQNLLT

SEQ ID NO: 3130 - protein, 14 aa, synthetic construct
GHDSPHKSGQLVIT

SEQ ID NO: 3131 - protein, 14 aa, synthetic construct
GHDSPHKSRQSQQT

SEQ ID NO: 3132 - protein, 14 aa, synthetic construct
GHDSPHKSGRTQET

SEQ ID NO: 3133 - protein, 14 aa, synthetic construct
GHDSPHKSVQTHQT

SEQ ID NO: 3134 - protein, 14 aa, synthetic construct
GHDSPHKSGQNQPA

SEQ ID NO: 3135 - protein, 14 aa, synthetic construct
KHDSPHKSGQNQQT

SEQ ID NO: 3136 - protein, 14 aa, synthetic construct
GHDSPHKSGQTQQT

SEQ ID NO: 3137 - protein, 14 aa, synthetic construct
GPDSPHKIGQNQQS

SEQ ID NO: 3138 - protein, 14 aa, synthetic construct
GHDSPHKSVQNQQT

SEQ ID NO: 3139 - protein, 14 aa, synthetic construct
GHDSPHKSRQDQHT

SEQ ID NO: 3140 - protein, 14 aa, synthetic construct
GPDSPHKSGQKQQT

SEQ ID NO: 3141 - protein, 14 aa, synthetic construct
GHDSPHKSRQSQHT

SEQ ID NO: 3142 - protein, 14 aa, synthetic construct
GHDSPHKSVQNQLT

SEQ ID NO: 3143 - protein, 14 aa, synthetic construct
AHDSPHKSGQNQQT

SEQ ID NO: 3144 - protein, 14 aa, synthetic construct
GQDSPHKSGQNQQS

SEQ ID NO: 3145 - protein, 14 aa, synthetic construct
GHDSPHKSGRNQQI

SEQ ID NO: 3146 - protein, 14 aa, synthetic construct
GYDSPHKSGQYQHT

SEQ ID NO: 3147 - protein, 14 aa, synthetic construct
GHDSPHKSRQNQQT

SEQ ID NO: 3148 - protein, 14 aa, synthetic construct
GHDSPHKSWVRQQT

SEQ ID NO: 3149 - protein, 14 aa, synthetic construct
GHESPHKSGQNQHS

SEQ ID NO: 3150 - protein, 14 aa, synthetic construct
GHDSPHKIGHNQQT

SEQ ID NO: 3151 - protein, 14 aa, synthetic construct
WHDSPHKSGQNQQT

SEQ ID NO: 3152 - protein, 14 aa, synthetic construct
RHDSPHKSGQNQQT

SEQ ID NO: 3153 - protein, 14 aa, synthetic construct
GHDSPHKSNAWQQT

SEQ ID NO: 3154 - protein, 14 aa, synthetic construct
GHDSPHKSGQSVPT

SEQ ID NO: 3155 - protein, 14 aa, synthetic construct
GHESPHKSGQNIQP

SEQ ID NO: 3156 - protein, 14 aa, synthetic construct
GHDSPHKSVQNHLN

SEQ ID NO: 3157 - protein, 14 aa, synthetic construct
GHDSPHKIGLDQQT

SEQ ID NO: 3158 - protein, 14 aa, synthetic construct
GHDSPHKRGPDQQS

SEQ ID NO: 3159 - protein, 14 aa, synthetic construct
GHDSPHKSGESQQT

SEQ ID NO: 3160 - protein, 14 aa, synthetic construct
GHDSPHKHGQNHQT

SEQ ID NO: 3161 - protein, 14 aa, synthetic construct
LHDSPHKSGQNQQT

SEQ ID NO: 3162 - protein, 14 aa, synthetic construct
GHDSPHKSVQNKQT

SEQ ID NO: 3163 - protein, 14 aa, synthetic construct
GQVSPHKSGQNQQT

SEQ ID NO: 3164 - protein, 14 aa, synthetic construct
GHDSPHKSGQRQLT

SEQ ID NO: 3165 - protein, 14 aa, synthetic construct
GHDSPHKIGQNQLT

SEQ ID NO: 3166 - protein, 14 aa, synthetic construct
GHDSPHKSGQIIVT

SEQ ID NO: 3167 - protein, 14 aa, synthetic construct
IHDSPHKSGQNQQT

SEQ ID NO: 3168 - protein, 14 aa, synthetic construct
GYDSPHKSGQKQST

SEQ ID NO: 3169 - protein, 14 aa, synthetic construct
MHDSPHKSGQNQQT

SEQ ID NO: 3170 - protein, 14 aa, synthetic construct
GDDSPHKSVQNQQT

SEQ ID NO: 3171 - protein, 14 aa, synthetic construct
GHDSPHKSVQSHQT

SEQ ID NO: 3172 - protein, 14 aa, synthetic construct
GHDSPHKSGQFVVT

SEQ ID NO: 3173 - protein, 14 aa, synthetic construct
GHDSPHKSRQNLQT

SEQ ID NO: 3174 - protein, 14 aa, synthetic construct
GHNSPHKSGQNQET

SEQ ID NO: 3175 - protein, 14 aa, synthetic construct
GHDSPHKSAQNQQI

SEQ ID NO: 3176 - protein, 14 aa, synthetic construct
NHDSPHKSGQNQQT

SEQ ID NO: 3177 - protein, 14 aa, synthetic construct
GHDSPHKSGQSQPT

SEQ ID NO: 3178 - protein, 14 aa, synthetic construct
GHESPHKSGQNEQT

SEQ ID NO: 3179 - protein, 14 aa, synthetic construct
GHDSPHKSAQNQQT

SEQ ID NO: 3180 - protein, 14 aa, synthetic construct
GHDSPHKSGQNQLT

SEQ ID NO: 3181 - protein, 14 aa, synthetic construct
GHDSPHKSAQNLLT

SEQ ID NO: 3182 - protein, 14 aa, synthetic construct
THDSPHKSGQNQQT

SEQ ID NO: 3183 - protein, 14 aa, synthetic construct
GNGSPHKRGQNQQT

SEQ ID NO: 3184 - protein, 14 aa, synthetic construct
GHDSPHKSGQSLQT

SEQ ID NO: 3185 - protein, 14 aa, synthetic construct
GHDSPHKSAQNHQT

SEQ ID NO: 3186 - protein, 14 aa, synthetic construct
GHDSPHKSGRNRQT

SEQ ID NO: 3187 - protein, 14 aa, synthetic construct
EHDSPHKSGQNQQT

SEQ ID NO: 3188 - protein, 14 aa, synthetic construct
GHDSPHKYGQNEQT

SEQ ID NO: 3189 - protein, 14 aa, synthetic construct
RHDSPHKSGHNQQT

SEQ ID NO: 3190 - protein, 14 aa, synthetic construct
GHDSPHKSQQNQQT

SEQ ID NO: 3191 - protein, 14 aa, synthetic construct
GHDSPHKSGQNQQI

SEQ ID NO: 3192 - protein, 14 aa, synthetic construct
QHDSPHKSGQNQQT

SEQ ID NO: 3193 - protein, 14 aa, synthetic construct
RHDSPHKIVQNQQT

SEQ ID NO: 3194 - protein, 14 aa, synthetic construct
YHDSPHKSGQNQQT

SEQ ID NO: 3195 - protein, 14 aa, synthetic construct
GHDSPHKSVQSKQT

SEQ ID NO: 3196 - protein, 14 aa, synthetic construct
GNDSPHKIGHNQQT

SEQ ID NO: 3197 - protein, 14 aa, synthetic construct
HHDSPHKSGQNQQT

SEQ ID NO: 3198 - protein, 14 aa, synthetic construct
GHDSPHKSGQTQQI

SEQ ID NO: 3199 - protein, 14 aa, synthetic construct
GQDSPHKSGQNPLT

SEQ ID NO: 3200 - protein, 14 aa, synthetic construct
GHDSPHKSGRDQKT

SEQ ID NO: 3201 - protein, 14 aa, synthetic construct
GHDSPHKSVHNQQN

SEQ ID NO: 3202 - protein, 14 aa, synthetic construct
GHDSPHKSGQWKRT

SEQ ID NO: 3203 - protein, 14 aa, synthetic construct
GHDSPHKSGQSQQI

SEQ ID NO: 3204 - protein, 14 aa, synthetic construct
GHDSPHKSRQAQQT

SEQ ID NO: 3205 - protein, 14 aa, synthetic construct
GHDSPHKSVQNHQI

SEQ ID NO: 3206 - protein, 14 aa, synthetic construct
GHDSPHKSKQNQQA

SEQ ID NO: 3207 - protein, 14 aa, synthetic construct
GHDSPHKSAQNQLN

SEQ ID NO: 3208 - protein, 14 aa, synthetic construct
GHDSPHKSGQTQPT

SEQ ID NO: 3209 - protein, 14 aa, synthetic construct
FHDSPHKSGQNQQT

SEQ ID NO: 3210 - protein, 14 aa, synthetic construct
GHDSPHKLWINQQT

SEQ ID NO: 3211 - protein, 14 aa, synthetic construct
GPDSPHKSGQNQQT

SEQ ID NO: 3212 - protein, 14 aa, synthetic construct
GHDSPHKSVQKQLT

SEQ ID NO: 3213 - protein, 14 aa, synthetic construct
GHDSPHKSGRNQLA

SEQ ID NO: 3214 - protein, 14 aa, synthetic construct
VHDSPHKSGQNQQS

SEQ ID NO: 3215 - protein, 14 aa, synthetic construct
GHDSPHKMGRNQQS

SEQ ID NO: 3216 - protein, 14 aa, synthetic construct
GHDSPHKSGISIQT

SEQ ID NO: 3217 - protein, 14 aa, synthetic construct
VHDSPHKSGQNQQT

SEQ ID NO: 3218 - protein, 14 aa, synthetic construct
GHDSPHKSVQNLQT

SEQ ID NO: 3219 - protein, 14 aa, synthetic construct
GHDSPHKMAHNQQT

SEQ ID NO: 3220 - protein, 14 aa, synthetic construct
GHDSPHKHGQNQQN

SEQ ID NO: 3221 - protein, 14 aa, synthetic construct
GHDSPHKSVQSQQS

SEQ ID NO: 3222 - protein, 14 aa, synthetic construct
GHDSPHKSGQTVCT

SEQ ID NO: 3223 - protein, 14 aa, synthetic construct
GQDSPHKSGQYQQI

SEQ ID NO: 3224 - protein, 14 aa, synthetic construct
GHDSPHKSGQQIMT

SEQ ID NO: 3225 - protein, 14 aa, synthetic construct
GHDSPHKSRQNEQS

SEQ ID NO: 3226 - protein, 14 aa, synthetic construct
GHDSPHKSGLNHQT

SEQ ID NO: 3227 - protein, 14 aa, synthetic construct
GYDSPHKSGQNQQT

SEQ ID NO: 3228 - protein, 14 aa, synthetic construct
GHDSPHKSGQNLQT

SEQ ID NO: 3229 - protein, 14 aa, synthetic construct
GHDSPHKSRQDQQT

SEQ ID NO: 3230 - protein, 14 aa, synthetic construct
GDDSPHKSGQKQLT

SEQ ID NO: 3231 - protein, 14 aa, synthetic construct
GDDSPHKSGHNQQT

SEQ ID NO: 3232 - protein, 14 aa, synthetic construct
GHDSPHKSGQMIHT

SEQ ID NO: 3233 - protein, 14 aa, synthetic construct
GHDSPHKSGRNHQS

SEQ ID NO: 3234 - protein, 14 aa, synthetic construct
GHDSPHKSVQNRQT

SEQ ID NO: 3235 - protein, 14 aa, synthetic construct
GHDSPHKSGQKMNT

SEQ ID NO: 3236 - protein, 14 aa, synthetic construct
GHDSPHKSGQSQQN

SEQ ID NO: 3237 - protein, 14 aa, synthetic construct
GHDSPHKSGQYQHA

SEQ ID NO: 3238 - protein, 4 aa, synthetic construct
KELV

SEQ ID NO: 3239 - protein, 18 aa, synthetic construct
KTIIGSGSPHSKAQNRHT

SEQ ID NO: 3240 - protein, 18 aa, synthetic construct
KTFPGSGSPHSKVQNQQT

SEQ ID NO: 3241 - protein, 18 aa, synthetic construct
KTEKMSGSPHSKAQNQQT

SEQ ID NO: 3242 - protein, 18 aa, synthetic construct
KTVNGSGSPHSKARDQQT

SEQ ID NO: 3243 - protein, 18 aa, synthetic construct
KTFNGSGSPHSKAPNLQT

SEQ ID NO: 3244 - protein, 18 aa, synthetic construct
KTEKTSGSPHSKAQNQQT

SEQ ID NO: 3245 - protein, 18 aa, synthetic construct
KTINGSGSPHSKAHVRQT

SEQ ID NO: 3246 - protein, 18 aa, synthetic construct
KTVNGSGSPHSKAPNQHT

SEQ ID NO: 3247 - protein, 18 aa, synthetic construct
KTEKISGSPHSKAQNQQT

SEQ ID NO: 3248 - protein, 18 aa, synthetic construct
KTVNGSGSPHSKTQSQQT

SEQ ID NO: 3249 - protein, 18 aa, synthetic construct
TTINGSGSPHSKAQNQQT

SEQ ID NO: 3250 - protein, 18 aa, synthetic construct
KSINESGSPHSKAQNQQI

SEQ ID NO: 3251 - protein, 18 aa, synthetic construct
KTERTSGSPHSKAQNQQT

SEQ ID NO: 3252 - protein, 18 aa, synthetic construct
KTINGSGSPHSKAQPAKT

SEQ ID NO: 3253 - protein, 18 aa, synthetic construct
KTEKSSGSPHSKAQNQQT

SEQ ID NO: 3254 - protein, 18 aa, synthetic construct
KTEKGSGSPHSKAQNQQT

SEQ ID NO: 3255 - protein, 18 aa, synthetic construct
KTINGSGSPHSKSQTQQN

SEQ ID NO: 3256 - protein, 18 aa, synthetic construct
KTERISGSPHSKAQNQQT

SEQ ID NO: 3257 - protein, 18 aa, synthetic construct
KTERASGSPHSKAQNQQT

SEQ ID NO: 3258 - protein, 18 aa, synthetic construct
KELHGSGSPHSKAQNQQT

SEQ ID NO: 3259 - protein, 18 aa, synthetic construct
KAINGSGSPHSKAQNLAT

SEQ ID NO: 3260 - protein, 18 aa, synthetic construct
KTVNGSGSPHSKSQNQLT

SEQ ID NO: 3261 - protein, 18 aa, synthetic construct
KTERNSGSPHSKAQNQQT

SEQ ID NO: 3262 - protein, 18 aa, synthetic construct
KTFNGSGSPHSKAQGQQT

SEQ ID NO: 3263 - protein, 18 aa, synthetic construct
KTERVSGSPHSKAQNQQT

SEQ ID NO: 3264 - protein, 18 aa, synthetic construct
KTINGSGSPHSKALNRQS

SEQ ID NO: 3265 - protein, 18 aa, synthetic construct
KTERLSGSPHSKAQNQQT

SEQ ID NO: 3266 - protein, 18 aa, synthetic construct
KTDNGSGSPHSKAHNQQT

SEQ ID NO: 3267 - protein, 18 aa, synthetic construct
KTFHGSGSPHSKTQNQQT

SEQ ID NO: 3268 - protein, 18 aa, synthetic construct
KTSNGSGSPHSKAQNPPT

SEQ ID NO: 3269 - protein, 18 aa, synthetic construct
ETINGSGSPHSKAQNLQT

SEQ ID NO: 3270 - protein, 18 aa, synthetic construct
NTINGSGSPHSKAQNQQT

SEQ ID NO: 3271 - protein, 18 aa, synthetic construct
KTENMSGSPHSKAQNQQT

SEQ ID NO: 3272 - protein, 18 aa, synthetic construct
KTENVSGSPHSKAQNQQT

SEQ ID NO: 3273 - protein, 18 aa, synthetic construct
KTSSGSGSPHSKAQYQQT

SEQ ID NO: 3274 - protein, 18 aa, synthetic construct
KTEKVSGSPHSKAQNQQT

SEQ ID NO: 3275 - protein, 18 aa, synthetic construct
KAINGSGSPHSKAQDQET

SEQ ID NO: 3276 - protein, 18 aa, synthetic construct
KTCNKSGSPHSKAQNQQT

SEQ ID NO: 3277 - protein, 18 aa, synthetic construct
KTEHLSGSPHSKAQNQQT

SEQ ID NO: 3278 - protein, 18 aa, synthetic construct
KAEMGSGSPHSKAQNQQT

SEQ ID NO: 3279 - protein, 18 aa, synthetic construct
KATNGSGSPHSKAQNHQT

SEQ ID NO: 3280 - protein, 18 aa, synthetic construct
KAIKGSGSPHSKAQDQQT

SEQ ID NO: 3281 - protein, 18 aa, synthetic construct
KTINGSGSPHSKGHWQQT

SEQ ID NO: 3282 - protein, 18 aa, synthetic construct
KTDKTSGSPHSKAQNQQT

SEQ ID NO: 3283 - protein, 18 aa, synthetic construct
KTFKGSGSPHSKAPNQQT

SEQ ID NO: 3284 - protein, 18 aa, synthetic construct
KTVNGSGSPHSKAQNQLI

SEQ ID NO: 3285 - protein, 18 aa, synthetic construct
KTINGSGSPHSKRPEQQT

SEQ ID NO: 3286 - protein, 18 aa, synthetic construct
KTINGSGSPHSKAQRTMT

SEQ ID NO: 3287 - protein, 18 aa, synthetic construct
KTEKASGSPHSKAQNQQT

SEQ ID NO: 3288 - protein, 18 aa, synthetic construct
KSDQGSGSPHSKAQNQQT

SEQ ID NO: 3289 - protein, 18 aa, synthetic construct
KTEITSGSPHSKAQNQQT

SEQ ID NO: 3290 - protein, 18 aa, synthetic construct
KTDKSSGSPHSKAQNQQT

SEQ ID NO: 3291 - protein, 18 aa, synthetic construct
KTIDGSGSPHSKAQNQQH

SEQ ID NO: 3292 - protein, 18 aa, synthetic construct
KNTNGSGSPHSKAQNQQT

SEQ ID NO: 3293 - protein, 18 aa, synthetic construct
KTETHSGSPHSKAQNQQT

SEQ ID NO: 3294 - protein, 18 aa, synthetic construct
KTINGSGSPHSKALHQHT

SEQ ID NO: 3295 - protein, 18 aa, synthetic construct
KTINGSGSPHSKAQHRIT

SEQ ID NO: 3296 - protein, 18 aa, synthetic construct
KTINGSGSPHSKAQYIHT

SEQ ID NO: 3297 - protein, 18 aa, synthetic construct
KTENISGSPHSKAQNQQT

SEQ ID NO: 3298 - protein, 18 aa, synthetic construct
KTINGSGSPHSKAQKFET

SEQ ID NO: 3299 - protein, 18 aa, synthetic construct
KTSNESGSPHSKAQNHQT

SEQ ID NO: 3300 - protein, 18 aa, synthetic construct
KTINGSGSPHSKAQFPST

SEQ ID NO: 3301 - protein, 18 aa, synthetic construct
KTERPSGSPHSKAQNQQT

SEQ ID NO: 3302 - protein, 18 aa, synthetic construct
KTERMSGSPHSKAQNQQT

SEQ ID NO: 3303 - protein, 18 aa, synthetic construct
KTERSSGSPHSKAQNQQT

SEQ ID NO: 3304 - protein, 18 aa, synthetic construct
KTELHSGSPHSKAQNQQT

SEQ ID NO: 3305 - protein, 18 aa, synthetic construct
KTELTSGSPHSKAQNQQT

SEQ ID NO: 3306 - protein, 18 aa, synthetic construct
KTINGSGSPHSKAHNQQR

SEQ ID NO: 3307 - protein, 18 aa, synthetic construct
KTINGSGSPHSKAQAIKT

SEQ ID NO: 3308 - protein, 18 aa, synthetic construct
KTENTSGSPHSKAQNQQT

SEQ ID NO: 3309 - protein, 18 aa, synthetic construct
KTIDGSGSPHSKGQNRQT

SEQ ID NO: 3310 - protein, 18 aa, synthetic construct
KNINGSGSPHSKAQSQQT

SEQ ID NO: 3311 - protein, 18 aa, synthetic construct
KTSNASGSPHSKAQNQLT

SEQ ID NO: 3312 - protein, 18 aa, synthetic construct
KTEARSGSPHSKAQNQQT

SEQ ID NO: 3313 - protein, 18 aa, synthetic construct
KTEKNSGSPHSKAQNQQT

SEQ ID NO: 3314 - protein, 18 aa, synthetic construct
KTANGSGSPHSKAQYQQT

SEQ ID NO: 3315 - protein, 18 aa, synthetic construct
KTVNGSGSPHSKAQYQHT

SEQ ID NO: 3316 - protein, 18 aa, synthetic construct
KTINGSGSPHTKAQNPQS

SEQ ID NO: 3317 - protein, 18 aa, synthetic construct
KTINGSGSPHSKGQNPPT

SEQ ID NO: 3318 - protein, 18 aa, synthetic construct
KTIIGSGSPHSKAQHQLT

SEQ ID NO: 3319 - protein, 18 aa, synthetic construct
KTINGSGSPHSKAQSPPT

SEQ ID NO: 3320 - protein, 18 aa, synthetic construct
NTIYGSGSPHSKAQNQQT

SEQ ID NO: 3321 - protein, 18 aa, synthetic construct
KTINGSGSPHSKAQAKLT

SEQ ID NO: 3322 - protein, 18 aa, synthetic construct
KTDKNSGSPHSKAQNQQT

SEQ ID NO: 3323 - protein, 18 aa, synthetic construct
KTINGSGSPHSKTKSQQT

SEQ ID NO: 3324 - protein, 18 aa, synthetic construct
KTINGSGSPHSKAQDRPT

SEQ ID NO: 3325 - protein, 18 aa, synthetic construct
KTINGSGSPHSKAQSQQL

SEQ ID NO: 3326 - protein, 18 aa, synthetic construct
KTENLSGSPHSKAQNQQT

SEQ ID NO: 3327 - protein, 18 aa, synthetic construct
KTINGSGSPHSKAQAFHT

SEQ ID NO: 3328 - protein, 18 aa, synthetic construct
KTINGSGSPHSKAQKQQD

SEQ ID NO: 3329 - protein, 18 aa, synthetic construct
KTFSGSGSPHSKAQNLQT

SEQ ID NO: 3330 - protein, 18 aa, synthetic construct
KAINGSGSPHSKAQNAQT

SEQ ID NO: 3331 - protein, 18 aa, synthetic construct
KTESWSGSPHSKAQNQQT

SEQ ID NO: 3332 - protein, 18 aa, synthetic construct
KTTNGSGSPHSKAHNQLT

SEQ ID NO: 3333 - protein, 18 aa, synthetic construct
KTEDKSGSPHSKAQNQQT

SEQ ID NO: 3334 - protein, 18 aa, synthetic construct
KTESASGSPHSKAQNQQT

SEQ ID NO: 3335 - protein, 18 aa, synthetic construct
KTNNGSGSPHSKAQNQQY

SEQ ID NO: 3336 - protein, 18 aa, synthetic construct
KTDKMSGSPHSKAQNQQT

SEQ ID NO: 3337 - protein, 18 aa, synthetic construct
KEVHGSGSPHSKAQNQQT

SEQ ID NO: 3338 - protein, 18 aa, synthetic construct
KTINGSGSPHSKAQKLNT

SEQ ID NO: 3339 - protein, 18 aa, synthetic construct
KTTNGSGSPHSKAQYQHT

SEQ ID NO: 3340 - protein, 18 aa, synthetic construct
KTISGSGSPHSKAQYQHT

SEQ ID NO: 3341 - protein, 18 aa, synthetic construct
KTESTSGSPHSKAQNQQT

SEQ ID NO: 3342 - protein, 18 aa, synthetic construct
KTINGSGSPHSKSQNVQT

SEQ ID NO: 3343 - protein, 18 aa, synthetic construct
KSINGSGSPHSKAQAQQT

SEQ ID NO: 3344 - protein, 18 aa, synthetic construct
KTVNGSGSPHSKAQNLQA

SEQ ID NO: 3345 - protein, 18 aa, synthetic construct
KTVRDSGSPHSKAQNQQT

SEQ ID NO: 3346 - protein, 18 aa, synthetic construct
KTFNASGSPHSKAPNQQT

SEQ ID NO: 3347 - protein, 18 aa, synthetic construct
KTDRMSGSPHSKAQNQQT

SEQ ID NO: 3348 - protein, 18 aa, synthetic construct
KTINGSGSPHSKAQTPPT

SEQ ID NO: 3349 - protein, 18 aa, synthetic construct
ETIKGSGSPHSKAQNQQT

SEQ ID NO: 3350 - protein, 18 aa, synthetic construct
KNHIGSGSPHSKAQNQQT

SEQ ID NO: 3351 - protein, 18 aa, synthetic construct
KTINGSGSPHSKAQYQHA

SEQ ID NO: 3352 - protein, 18 aa, synthetic construct
KTINGSGSPHSKAQGQQA

SEQ ID NO: 3353 - protein, 18 aa, synthetic construct
KTFNGSGSPHNKAQNHQT

SEQ ID NO: 3354 - protein, 18 aa, synthetic construct
KESDGSGSPHSKAQNQQT

SEQ ID NO: 3355 - protein, 18 aa, synthetic construct
KTINGSGSPHSKAQPPAT

SEQ ID NO: 3356 - protein, 18 aa, synthetic construct
KTINGSGSPHSKAQERPT

SEQ ID NO: 3357 - protein, 18 aa, synthetic construct
KTIKGSGSPHSKAQDLQT

SEQ ID NO: 3358 - protein, 18 aa, synthetic construct
KTDLKSGSPHSKAQNQQT

SEQ ID NO: 3359 - protein, 18 aa, synthetic construct
KTINGSGSPHSKAQAMHT

SEQ ID NO: 3360 - protein, 18 aa, synthetic construct
KTVPNSGSPHSKAQNQQT

SEQ ID NO: 3361 - protein, 18 aa, synthetic construct
KTVIGSGSPHSKALNQQT

SEQ ID NO: 3362 - protein, 18 aa, synthetic construct
KTINGSGSPHSKAQHPST

SEQ ID NO: 3363 - protein, 18 aa, synthetic construct
KTINGSGSPHSKAPGLQT

SEQ ID NO: 3364 - protein, 18 aa, synthetic construct
KTINGSGSPHSKAQGIRT

SEQ ID NO: 3365 - protein, 18 aa, synthetic construct
KTESHSGSPHSKAQNQQT

SEQ ID NO: 3366 - protein, 18 aa, synthetic construct
KTINGSGSPHSKAQAPAT

SEQ ID NO: 3367 - protein, 18 aa, synthetic construct
KTINGSGSPHSKSQSQQI

SEQ ID NO: 3368 - protein, 18 aa, synthetic construct
KAEHGSGSPHSKAQNQQT

SEQ ID NO: 3369 - protein, 18 aa, synthetic construct
KTEDRSGSPHSKAQNQQT

SEQ ID NO: 3370 - protein, 18 aa, synthetic construct
KNCLGSGSPHSKAQNQQT

SEQ ID NO: 3371 - protein, 18 aa, synthetic construct
KTDRGSGSPHSKAQNQQT

SEQ ID NO: 3372 - protein, 18 aa, synthetic construct
KTINGSGSPHSKAQIPPT

SEQ ID NO: 3373 - protein, 18 aa, synthetic construct
KTVKGSGSPHSKAQDQQT

SEQ ID NO: 3374 - protein, 18 aa, synthetic construct
KNADGSGSPHSKAQNQQT

SEQ ID NO: 3375 - protein, 18 aa, synthetic construct
KTDKVSGSPHSKAQNQQT

SEQ ID NO: 3376 - protein, 18 aa, synthetic construct
KTITGSGSPHSKAQTQLT

SEQ ID NO: 3377 - protein, 18 aa, synthetic construct
KTINGSGSPHSKAQAPST

SEQ ID NO: 3378 - protein, 18 aa, synthetic construct
KNCVGSGSPHSKAQNQQT

SEQ ID NO: 3379 - protein, 18 aa, synthetic construct
KTVKDSGSPHSKAQNQQT

SEQ ID NO: 3380 - protein, 18 aa, synthetic construct
KNALGSGSPHSKAQNQQT

SEQ ID NO: 3381 - protein, 18 aa, synthetic construct
KVINGSGSPHSKGQNQQT

SEQ ID NO: 3382 - protein, 18 aa, synthetic construct
KTSNASGSPHSKAHNQQT

SEQ ID NO: 3383 - protein, 18 aa, synthetic construct
KTINGSGSPHSKAQNTYA

SEQ ID NO: 3384 - protein, 18 aa, synthetic construct
KTINGSGSPHSKSQNQHI

SEQ ID NO: 3385 - protein, 18 aa, synthetic construct
KTEFVSGSPHSKAQNQQT

SEQ ID NO: 3386 - protein, 18 aa, synthetic construct
KTVNGSGSPHSKAQNHLT

SEQ ID NO: 3387 - protein, 18 aa, synthetic construct
KTREISGSPHSKAQNQQT

SEQ ID NO: 3388 - protein, 18 aa, synthetic construct
KTINGSGSPHSKAQIGMT

SEQ ID NO: 3389 - protein, 18 aa, synthetic construct
KTIDGSGSPHSKALNKQT

SEQ ID NO: 3390 - protein, 18 aa, synthetic construct
KQGEGSGSPHSKAQNQQT

SEQ ID NO: 3391 - protein, 18 aa, synthetic construct
KTVNGSGSPHSKAQLQQT

SEQ ID NO: 3392 - protein, 18 aa, synthetic construct
KSINGSGSPHSKTQSQQT

SEQ ID NO: 3393 - protein, 18 aa, synthetic construct
KSEKGSGSPHSKAQNQQT

SEQ ID NO: 3394 - protein, 18 aa, synthetic construct
KNVNGSGSPHSKAQNQQT

SEQ ID NO: 3395 - protein, 18 aa, synthetic construct
KGGEGSGSPHSKAQNQQT

SEQ ID NO: 3396 - protein, 18 aa, synthetic construct
KTINGSGSPHSKAQRMST

SEQ ID NO: 3397 - protein, 18 aa, synthetic construct
KTINGSGSPHSKAQGILT

SEQ ID NO: 3398 - protein, 18 aa, synthetic construct
KEFVGSGSPHSKAQNQQT

SEQ ID NO: 3399 - protein, 18 aa, synthetic construct
KTIIGSGSPHSKAQDRQT

SEQ ID NO: 3400 - protein, 18 aa, synthetic construct
KSDKGSGSPHSKAQNQQT

SEQ ID NO: 3401 - protein, 18 aa, synthetic construct
KTEQVSGSPHSKAQNQQT

SEQ ID NO: 3402 - protein, 18 aa, synthetic construct
KTEHVSGSPHSKAQNQQT

SEQ ID NO: 3403 - protein, 18 aa, synthetic construct
KTINGSGSPHSKARDWQT

SEQ ID NO: 3404 - protein, 18 aa, synthetic construct
KTENASGSPHSKAQNQQT

SEQ ID NO: 3405 - protein, 18 aa, synthetic construct
KEVQGSGSPHSKAQNQQT

SEQ ID NO: 3406 - protein, 18 aa, synthetic construct
KTINGSGSPHSKAQNTHD

SEQ ID NO: 3407 - protein, 18 aa, synthetic construct
KTINGSGSPHSKAPNLQI

SEQ ID NO: 3408 - protein, 18 aa, synthetic construct
KTINGSGSPHSKAQERST

SEQ ID NO: 3409 - protein, 18 aa, synthetic construct
KTSNGSGSPHSKAQNYQT

SEQ ID NO: 3410 - protein, 18 aa, synthetic construct
KTEYISGSPHSKAQNQQT

SEQ ID NO: 3411 - protein, 18 aa, synthetic construct
KTINGSGSPHSKAQRTCT

SEQ ID NO: 3412 - protein, 18 aa, synthetic construct
KTINGSGSPHSKAQIGHT

SEQ ID NO: 3413 - protein, 18 aa, synthetic construct
KNCWGSGSPHSKAQNQQT

SEQ ID NO: 3414 - protein, 18 aa, synthetic construct
KTINGSGSPHSKAQGAIT

SEQ ID NO: 3415 - protein, 18 aa, synthetic construct
KTDVNSGSPHSKAQNQQT

SEQ ID NO: 3416 - protein, 18 aa, synthetic construct
KSDIGSGSPHSKAQNQQT

SEQ ID NO: 3417 - protein, 18 aa, synthetic construct
KTINGSGSPHSKAQVPPT

SEQ ID NO: 3418 - protein, 18 aa, synthetic construct
KTINGSGSPHSKAQVQQI

SEQ ID NO: 3419 - protein, 18 aa, synthetic construct
KTINGSGSPHSKALMRQT

SEQ ID NO: 3420 - protein, 18 aa, synthetic construct
KTINGSGSPHSKAQYSVT

SEQ ID NO: 3421 - protein, 18 aa, synthetic construct
KNSIGSGSPHSKAQNQQT

SEQ ID NO: 3422 - protein, 18 aa, synthetic construct
KTINGSGSPHSKVPNLQT

SEQ ID NO: 3423 - protein, 18 aa, synthetic construct
KAINGSGSPHSKAQSQQI

SEQ ID NO: 3424 - protein, 18 aa, synthetic construct
KTINGSGSPHSKAQAITT

SEQ ID NO: 3425 - protein, 18 aa, synthetic construct
KTINGSGSPHSKAQKTLT

SEQ ID NO: 3426 - protein, 18 aa, synthetic construct
KTVNGSGSPHSKAQNQWT

SEQ ID NO: 3427 - protein, 18 aa, synthetic construct
KTINGSGSPHSKAQLHHT

SEQ ID NO: 3428 - protein, 18 aa, synthetic construct
KTEQTSGSPHSKAQNQQT

SEQ ID NO: 3429 - protein, 18 aa, synthetic construct
KTINGSGSPHSKAQNIII

SEQ ID NO: 3430 - protein, 18 aa, synthetic construct
KNSLGSGSPHSKAQNQQT

SEQ ID NO: 3431 - protein, 18 aa, synthetic construct
KTINGSGSPHSKAQGHHT

SEQ ID NO: 3432 - protein, 18 aa, synthetic construct
KTDRTSGSPHSKAQNQQT

SEQ ID NO: 3433 - protein, 18 aa, synthetic construct
KTINGSGSPHSKAQSKVT

SEQ ID NO: 3434 - protein, 18 aa, synthetic construct
KEVVGSGSPHSKAQNQQT

SEQ ID NO: 3435 - protein, 18 aa, synthetic construct
KTINGSGSPHSKAQLPST

SEQ ID NO: 3436 - protein, 18 aa, synthetic construct
KTINGSGSPHSKAIGKQT

SEQ ID NO: 3437 - protein, 18 aa, synthetic construct
KTEPTSGSPHSKAQNQQT

SEQ ID NO: 3438 - protein, 18 aa, synthetic construct
KTINGSGSPHSKAQAIHT

SEQ ID NO: 3439 - protein, 18 aa, synthetic construct
KTINGSGSPHSKAQHGLT

SEQ ID NO: 3440 - protein, 18 aa, synthetic construct
KSELGSGSPHSKAQNQQT

SEQ ID NO: 3441 - protein, 18 aa, synthetic construct
KTINGSGSPHSKAQFMCT

SEQ ID NO: 3442 - protein, 18 aa, synthetic construct
KTINVSGSPHSKAQGQQT

SEQ ID NO: 3443 - protein, 18 aa, synthetic construct
KTVNGSGSPHSKAQHLQT

SEQ ID NO: 3444 - protein, 18 aa, synthetic construct
KTINGSGSPHSKTQNHQN

SEQ ID NO: 3445 - protein, 18 aa, synthetic construct
KTINGSGSPHSKAQPART

SEQ ID NO: 3446 - protein, 18 aa, synthetic construct
KTVNGSGSPHSKAQSLQT

SEQ ID NO: 3447 - protein, 18 aa, synthetic construct
KTINGSGSPHSKSQSQLT

SEQ ID NO: 3448 - protein, 18 aa, synthetic construct
KTWQNSGSPHSKAQNQQT

SEQ ID NO: 3449 - protein, 18 aa, synthetic construct
KTINGSGSPHSKAQDRQS

SEQ ID NO: 3450 - protein, 18 aa, synthetic construct
KTINGSGSPHSKAQMPST

SEQ ID NO: 3451 - protein, 18 aa, synthetic construct
KTINGSGSPHSKAQGSLT

SEQ ID NO: 3452 - protein, 18 aa, synthetic construct
KTEVTSGSPHSKAQNQQT

SEQ ID NO: 3453 - protein, 18 aa, synthetic construct
KTVIGSGSPHSKSQNQQT

SEQ ID NO: 3454 - protein, 18 aa, synthetic construct
KAVNVSGSPHSKAQNQQT

SEQ ID NO: 3455 - protein, 18 aa, synthetic construct
KTDRNSGSPHSKAQNQQT

SEQ ID NO: 3456 - protein, 18 aa, synthetic construct
KTINGSGSPHSKAQVPAT

SEQ ID NO: 3457 - protein, 18 aa, synthetic construct
KGVLGSGSPHSKAQNQQT

SEQ ID NO: 3458 - protein, 18 aa, synthetic construct
KAINGSGSPHSKAQDKQT

SEQ ID NO: 3459 - protein, 18 aa, synthetic construct
KTSNGSGSPHSKAHYQQT

SEQ ID NO: 3460 - protein, 18 aa, synthetic construct
KTINGSGSPHSKAQVPST

SEQ ID NO: 3461 - protein, 18 aa, synthetic construct
KTELRSGSPHSKAQNQQT

SEQ ID NO: 3462 - protein, 18 aa, synthetic construct
KNINGSGSPHSKAQNHQT

SEQ ID NO: 3463 - protein, 18 aa, synthetic construct
KTINGSGSPHSKARGEQT

SEQ ID NO: 3464 - protein, 18 aa, synthetic construct
KTEDLSGSPHSKAQNQQT

SEQ ID NO: 3465 - protein, 18 aa, synthetic construct
KTINGSGSPHSKAPGQQT

SEQ ID NO: 3466 - protein, 18 aa, synthetic construct
KTINGSGSPHSKAQSLQI

SEQ ID NO: 3467 - protein, 18 aa, synthetic construct
KTINGSGSPHSKRLEQQT

SEQ ID NO: 3468 - protein, 18 aa, synthetic construct
KTERGSGSPHSKAQNQQT

SEQ ID NO: 3469 - protein, 18 aa, synthetic construct
KTVNGSGSPHSKAPNQQT

SEQ ID NO: 3470 - protein, 18 aa, synthetic construct
KTSNGSGSPHSKAQNQST

SEQ ID NO: 3471 - protein, 18 aa, synthetic construct
KTINGSGSPHSKAQKVIT

SEQ ID NO: 3472 - protein, 18 aa, synthetic construct
KTEGISGSPHSKAQNQQT

SEQ ID NO: 3473 - protein, 18 aa, synthetic construct
KTINGSGSPHSKAQNNDQ

SEQ ID NO: 3474 - protein, 18 aa, synthetic construct
KTINGSGSPHSKAQSVHT

SEQ ID NO: 3475 - protein, 18 aa, synthetic construct
KTINGSGSPHSKAQPLGT

SEQ ID NO: 3476 - protein, 18 aa, synthetic construct
KTCNASGSPHSKAQNQQT

SEQ ID NO: 3477 - protein, 18 aa, synthetic construct
KAINGSGSPHSKAHNQET

SEQ ID NO: 3478 - protein, 18 aa, synthetic construct
KTEGLSGSPHSKAQNQQT

SEQ ID NO: 3479 - protein, 18 aa, synthetic construct
KTRDASGSPHSKAQNQQT

SEQ ID NO: 3480 - protein, 18 aa, synthetic construct
KTSNGSGSPHSKAQNLQI

SEQ ID NO: 3481 - protein, 18 aa, synthetic construct
KTGNGSGSPHSKAQIQQT

SEQ ID NO: 3482 - protein, 18 aa, synthetic construct
KTDRSSGSPHSKAQNQQT

SEQ ID NO: 3483 - protein, 18 aa, synthetic construct
KTINGSGSPHSKAQVRNT

SEQ ID NO: 3484 - protein, 18 aa, synthetic construct
KTINGSGSPHSKAPSNQT

SEQ ID NO: 3485 - protein, 18 aa, synthetic construct
KTINGSGSPHSKAQVGHT

SEQ ID NO: 3486 - protein, 18 aa, synthetic construct
KNAIGSGSPHSKAQNQQT

SEQ ID NO: 3487 - protein, 18 aa, synthetic construct
KAENGSGSPHSKAQNQQT

SEQ ID NO: 3488 - protein, 18 aa, synthetic construct
KTINGSGSPHSKAQRDIT

SEQ ID NO: 3489 - protein, 18 aa, synthetic construct
KTINGSGSPHSKAQMPNT

SEQ ID NO: 3490 - protein, 18 aa, synthetic construct
KTVNGSGSPHSKSQNQQT

SEQ ID NO: 3491 - protein, 18 aa, synthetic construct
KTINGSGSPHSKARGLQT

SEQ ID NO: 3492 - protein, 18 aa, synthetic construct
KTELGSGSPHSKAQNQQT

SEQ ID NO: 3493 - protein, 18 aa, synthetic construct
KAETGSGSPHSKAQNQQT

SEQ ID NO: 3494 - protein, 18 aa, synthetic construct
KTINGSGSPHSKLQKQQT

SEQ ID NO: 3495 - protein, 18 aa, synthetic construct
KTINGSGSPHSKAPSLQT

SEQ ID NO: 3496 - protein, 18 aa, synthetic construct
KTINGSGSPHSKAQRDQT

SEQ ID NO: 3497 - protein, 18 aa, synthetic construct
KTDVGSGSPHSKAQNQQT

SEQ ID NO: 3498 - protein, 18 aa, synthetic construct
KTINGSGSPHSKNRDQQT

SEQ ID NO: 3499 - protein, 18 aa, synthetic construct
KSINGSGSPHSKAPNLQT

SEQ ID NO: 3500 - protein, 18 aa, synthetic construct
KTINGSGSPHSKAQAKGT

SEQ ID NO: 3501 - protein, 18 aa, synthetic construct
KTVNGSGSPHSKAQDKQT

SEQ ID NO: 3502 - protein, 18 aa, synthetic construct
KTINGSGSPHSKAQSAHT

SEQ ID NO: 3503 - protein, 18 aa, synthetic construct
KTVPTSGSPHSKAQNQQT

SEQ ID NO: 3504 - protein, 18 aa, synthetic construct
KTIDGSGSPHSKSQNHQT

SEQ ID NO: 3505 - protein, 18 aa, synthetic construct
KTDVKSGSPHSKAQNQQT

SEQ ID NO: 3506 - protein, 18 aa, synthetic construct
KAINRSGSPHSKAQDQQT

SEQ ID NO: 3507 - protein, 18 aa, synthetic construct
KTINGSGSPHSKAQSTMT

SEQ ID NO: 3508 - protein, 18 aa, synthetic construct
KTVNASGSPHSKAQNQLT

SEQ ID NO: 3509 - protein, 18 aa, synthetic construct
KTINGSGSPHSKAQREMT

SEQ ID NO: 3510 - protein, 18 aa, synthetic construct
KTVHGSGSPHSKAQSQQT

SEQ ID NO: 3511 - protein, 18 aa, synthetic construct
KTINGSGSPHSKAQYRAT

SEQ ID NO: 3512 - protein, 18 aa, synthetic construct
KTEPMSGSPHSKAQNQQT

SEQ ID NO: 3513 - protein, 18 aa, synthetic construct
KTINGSGSPHSKNQWQQT

SEQ ID NO: 3514 - protein, 18 aa, synthetic construct
KETAGSGSPHSKAQNQQT

SEQ ID NO: 3515 - protein, 18 aa, synthetic construct
KTINGSGSPHSKAQRMNT

SEQ ID NO: 3516 - protein, 18 aa, synthetic construct
KNNLGSGSPHSKAQNQQT

SEQ ID NO: 3517 - protein, 18 aa, synthetic construct
KTINGSGSPHAKAQNHQT

SEQ ID NO: 3518 - protein, 18 aa, synthetic construct
KTINGSGSPHSKAGDSQT

SEQ ID NO: 3519 - protein, 18 aa, synthetic construct
KTINGSGSPHSKLKSQQT

SEQ ID NO: 3520 - protein, 18 aa, synthetic construct
KTINGSGSPHSKAQKIST

SEQ ID NO: 3521 - protein, 18 aa, synthetic construct
KTEYNSGSPHSKAQNQQT

SEQ ID NO: 3522 - protein, 18 aa, synthetic construct
KTINGSGSPHSKAPSMQT

SEQ ID NO: 3523 - protein, 18 aa, synthetic construct
EAINGSGSPHSKAQNQQT

SEQ ID NO: 3524 - protein, 18 aa, synthetic construct
KTINGSGSPHSKASPRQT

SEQ ID NO: 3525 - protein, 18 aa, synthetic construct
KTINGSGSPHSKRMEQQT

SEQ ID NO: 3526 - protein, 18 aa, synthetic construct
KTINGSGSPHSKAQYQNT

SEQ ID NO: 3527 - protein, 18 aa, synthetic construct
KEINGRGSPHSKAQNQQT

SEQ ID NO: 3528 - protein, 18 aa, synthetic construct
KTVNRNGSPHSKAQNQQT

SEQ ID NO: 3529 - protein, 18 aa, synthetic construct
KTINGPGSPHSKAHNQQT

SEQ ID NO: 3530 - protein, 18 aa, synthetic construct
KTSYGNGSPHSKAQNQQT

SEQ ID NO: 3531 - protein, 18 aa, synthetic construct
KSVNGNGSPHSKAQNQQT

SEQ ID NO: 3532 - protein, 18 aa, synthetic construct
KTINGSGSPHGWVQNQQT

SEQ ID NO: 3533 - protein, 18 aa, synthetic construct
KTINGGGSPHSKAQTQQI

SEQ ID NO: 3534 - protein, 18 aa, synthetic construct
KTVHGNGSPHSKAQNQQT

SEQ ID NO: 3535 - protein, 18 aa, synthetic construct
KTINGGGSPHSKAQNQQC

SEQ ID NO: 3536 - protein, 18 aa, synthetic construct
KTIDGGGSPHSKAQNKQT

SEQ ID NO: 3537 - protein, 18 aa, synthetic construct
KTINGGGSPHSKAQNQLI

SEQ ID NO: 3538 - protein, 18 aa, synthetic construct
KNINGGGSPHSKAQNQQT

SEQ ID NO: 3539 - protein, 18 aa, synthetic construct
KTINGGGSPHSKSQNQLT

SEQ ID NO: 3540 - protein, 18 aa, synthetic construct
KTVNGNGSPHSKAQNKQT

SEQ ID NO: 3541 - protein, 18 aa, synthetic construct
KTVNGNGSPHSKAQNQHT

SEQ ID NO: 3542 - protein, 18 aa, synthetic construct
KTINGGGSPHSKALNQQN

SEQ ID NO: 3543 - protein, 18 aa, synthetic construct
KTINGTGSPHSKAQNHQI

SEQ ID NO: 3544 - protein, 18 aa, synthetic construct
KTIIGGGSPHSKAHNQQT

SEQ ID NO: 3545 - protein, 18 aa, synthetic construct
KTINGNGSPHSKAQNPLT

SEQ ID NO: 3546 - protein, 18 aa, synthetic construct
KSIKGNGSPHSKAQNQQT

SEQ ID NO: 3547 - protein, 18 aa, synthetic construct
KTINGGGSPHSKAQSQQI

SEQ ID NO: 3548 - protein, 18 aa, synthetic construct
KTINGSVSPHGKAQNQLT

SEQ ID NO: 3549 - protein, 18 aa, synthetic construct
KTINGIGSPHSKAQNLGT

SEQ ID NO: 3550 - protein, 18 aa, synthetic construct
KTVNGNGSPHSKAQNHQT

SEQ ID NO: 3551 - protein, 18 aa, synthetic construct
KTSNGGGSPHSKAQNLQT

SEQ ID NO: 3552 - protein, 18 aa, synthetic construct
KTINGGGSPHSKSQNQHT

SEQ ID NO: 3553 - protein, 18 aa, synthetic construct
KTVNGGGSPHSKAQSQQT

SEQ ID NO: 3554 - protein, 18 aa, synthetic construct
KTIPIDGSPHSKAQNQQT

SEQ ID NO: 3555 - protein, 18 aa, synthetic construct
KTINGGGSPHSKAQNPPT

SEQ ID NO: 3556 - protein, 18 aa, synthetic construct
KTINGLGSPHSKSQNQQT

SEQ ID NO: 3557 - protein, 18 aa, synthetic construct
KTINGTGSPHSKAQNQQM

SEQ ID NO: 3558 - protein, 18 aa, synthetic construct
KTIRDAGSPHSKAQNQQT

SEQ ID NO: 3559 - protein, 18 aa, synthetic construct
KTVNGGGSPHSKAQNQQS

SEQ ID NO: 3560 - protein, 18 aa, synthetic construct
KTIQDGGSPHSKAQNQQT

SEQ ID NO: 3561 - protein, 18 aa, synthetic construct
KTISGGGSPHSKAQNQQN

SEQ ID NO: 3562 - protein, 18 aa, synthetic construct
KTINGGGSPHSKAQDKQT

SEQ ID NO: 3563 - protein, 18 aa, synthetic construct
KTIIGGGSPHSKAQNPQT

SEQ ID NO: 3564 - protein, 18 aa, synthetic construct
KTINGTGSPHSKAPNQLT

SEQ ID NO: 3565 - protein, 18 aa, synthetic construct
KTFNGGGSPHSKAQYQQT

SEQ ID NO: 3566 - protein, 18 aa, synthetic construct
KTVNGGGSPHSKAQHQQT

SEQ ID NO: 3567 - protein, 18 aa, synthetic construct
KTIPMEGSPHSKAQNQQT

SEQ ID NO: 3568 - protein, 18 aa, synthetic construct
KTVNGGGSPHSKSQNQQT

SEQ ID NO: 3569 - protein, 18 aa, synthetic construct
KTINGGGSPHSKAQNQMT

SEQ ID NO: 3570 - protein, 18 aa, synthetic construct
KTIRENGSPHSKAQNQQT

SEQ ID NO: 3571 - protein, 18 aa, synthetic construct
KTINGSASPHSKAHSQQT

SEQ ID NO: 3572 - protein, 18 aa, synthetic construct
KTNNGGGSPHSKAQNLQT

SEQ ID NO: 3573 - protein, 18 aa, synthetic construct
KSINGGGSPHSKAQYQQT

SEQ ID NO: 3574 - protein, 18 aa, synthetic construct
KTVNGNGSPHSKSQNQQT

SEQ ID NO: 3575 - protein, 18 aa, synthetic construct
KTLNGNGSPHSKAQNLQT

SEQ ID NO: 3576 - protein, 18 aa, synthetic construct
KTINGSGSSHSKAQNQQT

SEQ ID NO: 3577 - protein, 18 aa, synthetic construct
KTVNGGGSPHSKAQNHQT

SEQ ID NO: 3578 - protein, 18 aa, synthetic construct
KTINGGGSPHSKAQYQHT

SEQ ID NO: 3579 - protein, 18 aa, synthetic construct
KTIPKNGSPHSKAQNQQT

SEQ ID NO: 3580 - protein, 18 aa, synthetic construct
KTINKEGSPHSKAQNQQT

SEQ ID NO: 3581 - protein, 18 aa, synthetic construct
KTVNGGGSPHSKAQNLQT

SEQ ID NO: 3582 - protein, 18 aa, synthetic construct
KTIPAIGSPHSKAQNQQT

SEQ ID NO: 3583 - protein, 18 aa, synthetic construct
KTINGGGSPHSKAQNPQA

SEQ ID NO: 3584 - protein, 18 aa, synthetic construct
KTINGNGSPHSKSQNQHT

SEQ ID NO: 3585 - protein, 18 aa, synthetic construct
KTINGGGSPHSKSQNRQT

SEQ ID NO: 3586 - protein, 18 aa, synthetic construct
KTINGGGSPHSKAQRQQT

SEQ ID NO: 3587 - protein, 18 aa, synthetic construct
KTIIKNGSPHSKAQNQQT

SEQ ID NO: 3588 - protein, 18 aa, synthetic construct
KTINGSGSPHSYHVNQQT

SEQ ID NO: 3589 - protein, 18 aa, synthetic construct
KTERVSGSPHSKAQNQQT

SEQ ID NO: 3590 - protein, 4 aa, synthetic construct
KELM

SEQ ID NO: 3591 - protein, 18 aa, synthetic construct
KTFNRSGSPHSKAQNQQI

SEQ ID NO: 3592 - protein, 18 aa, synthetic construct
KTINGSGSPHTKAQNPPT

SEQ ID NO: 3593 - protein, 18 aa, synthetic construct
KSLNGSGSPHTKAQNQQT

SEQ ID NO: 3594 - protein, 18 aa, synthetic construct
KTENKSGSPHSKAQNQQT

SEQ ID NO: 3595 - protein, 18 aa, synthetic construct
KTDKGSGSPHSKAQNQQT

SEQ ID NO: 3596 - protein, 18 aa, synthetic construct
KTSNASGSPHSKAQHQQT

SEQ ID NO: 3597 - protein, 18 aa, synthetic construct
KTINASGSPHSKAINQQT

SEQ ID NO: 3598 - protein, 18 aa, synthetic construct
KTINGSGSPHSKAPNQQH

SEQ ID NO: 3599 - protein, 18 aa, synthetic construct
KTVNASGSPHSKAQNHQT

SEQ ID NO: 3600 - protein, 18 aa, synthetic construct
KTIDGSGSPHSKAENRQT

SEQ ID NO: 3601 - protein, 18 aa, synthetic construct
KTIKGSGSPHSKVQDQQT

SEQ ID NO: 3602 - protein, 18 aa, synthetic construct
KAINGSGSPHSKAQTQQA

SEQ ID NO: 3603 - protein, 18 aa, synthetic construct
KTEAKSGSPHSKAQNQQT

SEQ ID NO: 3604 - protein, 18 aa, synthetic construct
KTIPGSGSPHSKAQNLQT

SEQ ID NO: 3605 - protein, 18 aa, synthetic construct
KTIHGSGSPHSKAQNQAT

SEQ ID NO: 3606 - protein, 18 aa, synthetic construct
KAINGHDSPHKSGQIRQT

SEQ ID NO: 3607 - protein, 18 aa, synthetic construct
KTINGHDSPHKIGQNQHA

SEQ ID NO: 3608 - protein, 18 aa, synthetic construct
KAINGYDSPHKSGQKQQT

SEQ ID NO: 3609 - protein, 18 aa, synthetic construct
KTESGHDSPHKSGQNQQT

SEQ ID NO: 3610 - protein, 18 aa, synthetic construct
KTINGHDSPHKSGQSVQT

SEQ ID NO: 3611 - protein, 18 aa, synthetic construct
TTINGHDSPHKSGQNQQT

SEQ ID NO: 3612 - protein, 18 aa, synthetic construct
KTINGHESPHKSGRSQQT

SEQ ID NO: 3613 - protein, 18 aa, synthetic construct
KTINGHDSPHKSGQNKLE

SEQ ID NO: 3614 - protein, 18 aa, synthetic construct
KTINGHDSPHKTGQNQQK

SEQ ID NO: 3615 - protein, 18 aa, synthetic construct
KAINGHDNPHKSGQNQQT

SEQ ID NO: 3616 - protein, 18 aa, synthetic construct
KTINGQDSPHKSGQHQQA

SEQ ID NO: 3617 - protein, 18 aa, synthetic construct
KSINGHDSPHKSGQIQHT

SEQ ID NO: 3618 - protein, 18 aa, synthetic construct
KAINGHDSPHKSGPRQQT

SEQ ID NO: 3619 - protein, 18 aa, synthetic construct
KTVNGHDSPHKSGHTQQT

SEQ ID NO: 3620 - protein, 18 aa, synthetic construct
KSINGHDSPHKSGQRQHT

SEQ ID NO: 3621 - protein, 18 aa, synthetic construct
KAINGHDSPHKSAQSQQT

SEQ ID NO: 3622 - protein, 18 aa, synthetic construct
KSIYGHESPHKSGQNQQS

SEQ ID NO: 3623 - protein, 18 aa, synthetic construct
KTVNGHDSPHKSLQNQQT

SEQ ID NO: 3624 - protein, 18 aa, synthetic construct
KTSNGYDSPHKSGQKQQT

SEQ ID NO: 3625 - protein, 18 aa, synthetic construct
KTVNGHDSPHKSGRNQET

SEQ ID NO: 3626 - protein, 18 aa, synthetic construct
KTTNGHDSPHKSGQTQLT

SEQ ID NO: 3627 - protein, 18 aa, synthetic construct
KAINGHDSPHKSEKNQQT

SEQ ID NO: 3628 - protein, 18 aa, synthetic construct
KIINGRDSPHKSGQDQQT

SEQ ID NO: 3629 - protein, 18 aa, synthetic construct
KTISGHDSPHKTGHNQQT

SEQ ID NO: 3630 - protein, 18 aa, synthetic construct
KTVNAHDSPHKSGQNQLT

SEQ ID NO: 3631 - protein, 18 aa, synthetic construct
KSINGYDSPHKSGQTQQT

SEQ ID NO: 3632 - protein, 18 aa, synthetic construct
KTINGHESPHKSGQTQQI

SEQ ID NO: 3633 - protein, 18 aa, synthetic construct
KTINGHDSPHKSGQSKQA

SEQ ID NO: 3634 - protein, 18 aa, synthetic construct
KAIIGHESPHKSGQNQQT

SEQ ID NO: 3635 - protein, 18 aa, synthetic construct
KTINGHDSPHKTGQNQPP

SEQ ID NO: 3636 - protein, 743 aa, synthetic construct
MAADGYLPDWLEDNLSEGIREWWALKPGAPQPKANQQHQDNARGLVLPGYKYLGPGNGLDKGEPVNAADAAALEHDKAYDQQLKAGDNPYLKYNHADAEFQERLKEDTSFGGNLGRAVFQAKKRLLEPLGLVEEAAKTAPGKKRPVEQSPQEPDSSAGIGKSGAQPAKKRLNFGQTGDTESVPDPQPIGEPPAAPSGVGSLTMASGGGAPVADNNEGADGVGSSSGNWHCDSQWLGDRVITTSTRTWALPTYNNHLYKQISNSTSGGSSNDNAYFGYSTPWGYFDFNRFHCHFSPRDWQRLINNNWGFRPKRLNFKLFNIQVKEVTDNNGVKTIANNLTSTVQVFTDSDYQLPYVLGSAHEGCLPPFPADVFMIPQYGYLTLNDGSQAVGRSSFYCLEYFPSQMLRTGNNFQFSYEFENVPFHSSYAHSQSLDRLMNPLIDQYLYYLSKTINGSGQNQQTLKFSVAGPSNMAVQGRNYIPGPSYRQQRVSTTVTQNNNSEFAWPGASSWALNGRNSLMNPGPAMASHKEGEDRFFPLSGSLIFGKQGTGRDNVDADKVMITNEEEIKTTNPVATESYGQVATNHQSPLNGAVHLYAQAQTGWVQNQGILPGMVWQDRDVYLQGPIWAKIPHTDGNFHPSPLMGGFGMKHPPPQILIKNTPVPADPPTAFNKDKLNSFITQYSTGQVSVEIEWELQKENSKRWNPEIQYTSNYYKSNNVEFAVNTEGVYSEPRPIGTRYLTRNL

SEQ ID NO: 3637 - protein, 18 aa, synthetic construct
KTIKGNDSPHKSVQNQQT

SEQ ID NO: 3638 - protein, 18 aa, synthetic construct
KTEFGHDSPHKSGQNQQT

SEQ ID NO: 3639 - protein, 18 aa, synthetic construct
KTINGHDSPHKSAQNYQT

SEQ ID NO: 3640 - protein, 18 aa, synthetic construct
KTINAHDSPHKIGQNHQT

SEQ ID NO: 3641 - protein, 18 aa, synthetic construct
KTINGHESPHKSAQNRQT

SEQ ID NO: 3642 - protein, 18 aa, synthetic construct
KTTNGHDSPHKSGQNQQG

SEQ ID NO: 3643 - protein, 18 aa, synthetic construct
KTIKGQDSPHKIGQNQQT

SEQ ID NO: 3644 - protein, 18 aa, synthetic construct
KTVNGHDSPHKSGQNHLT

SEQ ID NO: 3645 - protein, 18 aa, synthetic construct
KSINGHDSPHKSGQYQHT

SEQ ID NO: 3646 - protein, 18 aa, synthetic construct
KTINGNDSPHKSVQNHQT

SEQ ID NO: 3647 - protein, 18 aa, synthetic construct
KTITGHDSPHKSGQNQWT

SEQ ID NO: 3648 - protein, 18 aa, synthetic construct
KTNNGHDSPHKSVQNQHT

SEQ ID NO: 3649 - protein, 18 aa, synthetic construct
KTIDGHDSPHKSGQNQHA

SEQ ID NO: 3650 - protein, 18 aa, synthetic construct
KTVNGHDSPHKSGQTRQT

SEQ ID NO: 3651 - protein, 18 aa, synthetic construct
KTVNGHDSPHKSGQNLHT

SEQ ID NO: 3652 - protein, 18 aa, synthetic construct
KAISGHDSPHKSGLNQQT

SEQ ID NO: 3653 - protein, 18 aa, synthetic construct
KAINGHDSPHKSAQNQET

SEQ ID NO: 3654 - protein, 18 aa, synthetic construct
KTITGHDSPHKSGQHLQT

SEQ ID NO: 3655 - protein, 18 aa, synthetic construct
KTINGHDSPHKSRLNQPT

SEQ ID NO: 3656 - protein, 18 aa, synthetic construct
KTVDGHDSPHKSGQKQQT

SEQ ID NO: 3657 - protein, 18 aa, synthetic construct
KTINGQDSPHKSGQNQDT

SEQ ID NO: 3658 - protein, 18 aa, synthetic construct
KTIEGHDSPHKSGRNQQT

SEQ ID NO: 3659 - protein, 18 aa, synthetic construct
KTTNGHDSPHKSGQNLLT

SEQ ID NO: 3660 - protein, 18 aa, synthetic construct
KTINGHDSPHKSGQLVIT

SEQ ID NO: 3661 - protein, 18 aa, synthetic construct
KTVNGHDSPHKSRQSQQT

SEQ ID NO: 3662 - protein, 18 aa, synthetic construct
KTINGHDSPHKSGRTQET

SEQ ID NO: 3663 - protein, 18 aa, synthetic construct
KTINGHDSPHKSVQTHQT

SEQ ID NO: 3664 - protein, 18 aa, synthetic construct
KTSNGHDSPHKSGQNQPA

SEQ ID NO: 3665 - protein, 18 aa, synthetic construct
KTEGKHDSPHKSGQNQQT

SEQ ID NO: 3666 - protein, 18 aa, synthetic construct
KVINGHDSPHKSGQTQQT

SEQ ID NO: 3667 - protein, 18 aa, synthetic construct
KTINGPDSPHKIGQNQQS

SEQ ID NO: 3668 - protein, 18 aa, synthetic construct
KAVNGHDSPHKSVQNQQT

SEQ ID NO: 3669 - protein, 18 aa, synthetic construct
KTINGHDSPHKSRQDQHT

SEQ ID NO: 3670 - protein, 18 aa, synthetic construct
KAINGPDSPHKSGQKQQT

SEQ ID NO: 3671 - protein, 18 aa, synthetic construct
KTINGHDSPHKSRQSQHT

SEQ ID NO: 3672 - protein, 18 aa, synthetic construct
KTIYGHDSPHKSVQNQLT

SEQ ID NO: 3673 - protein, 18 aa, synthetic construct
KTVNGHDSPHKSGQNLLT

SEQ ID NO: 3674 - protein, 18 aa, synthetic construct
KTESAHDSPHKSGQNQQT

SEQ ID NO: 3675 - protein, 18 aa, synthetic construct
KTTNGQDSPHKSGQNQQS

SEQ ID NO: 3676 - protein, 18 aa, synthetic construct
KTIDGHDSPHKSGRNQQI

SEQ ID NO: 3677 - protein, 18 aa, synthetic construct
KTINGYDSPHKSGQYQHT

SEQ ID NO: 3678 - protein, 18 aa, synthetic construct
KTDNGHDSPHKSRQNQQT

SEQ ID NO: 3679 - protein, 18 aa, synthetic construct
KTINGHDSPHKSWVRQQT

SEQ ID NO: 3680 - protein, 18 aa, synthetic construct
KTINGHESPHKSGQNQHS

SEQ ID NO: 3681 - protein, 18 aa, synthetic construct
KTVNGHDSPHKIGHNQQT

SEQ ID NO: 3682 - protein, 18 aa, synthetic construct
KTCNGHDSPHKSGRNQQT

SEQ ID NO: 3683 - protein, 18 aa, synthetic construct
KNVVGHDSPHKSGQNQQT

SEQ ID NO: 3684 - protein, 18 aa, synthetic construct
KTELWHDSPHKSGQNQQT

SEQ ID NO: 3685 - protein, 18 aa, synthetic construct
KTELRHDSPHKSGQNQQT

SEQ ID NO: 3686 - protein, 18 aa, synthetic construct
KTINGHDSPHKSNAWQQT

SEQ ID NO: 3687 - protein, 18 aa, synthetic construct
KTDAGHDSPHKSGQNQQT

SEQ ID NO: 3688 - protein, 18 aa, synthetic construct
KTEVGHDSPHKSGQNQQT

SEQ ID NO: 3689 - protein, 18 aa, synthetic construct
KTESRHDSPHKSGQNQQT

SEQ ID NO: 3690 - protein, 18 aa, synthetic construct
KSELGHDSPHKSGQNQQT

SEQ ID NO: 3691 - protein, 18 aa, synthetic construct
KTINGHDSPHKSGQSVPT

SEQ ID NO: 3692 - protein, 18 aa, synthetic construct
KTINGHESPHKSGQNIQP

SEQ ID NO: 3693 - protein, 18 aa, synthetic construct
KTEMKHDSPHKSGQNQQT

SEQ ID NO: 3694 - protein, 18 aa, synthetic construct
KTINGHDSPHKSVQNHLN

SEQ ID NO: 3695 - protein, 18 aa, synthetic construct
KTINGHDSPHKIGLDQQT

SEQ ID NO: 3696 - protein, 18 aa, synthetic construct
KTINGHDSPHKRGPDQQS

SEQ ID NO: 3697 - protein, 18 aa, synthetic construct
KTIKGHDSPHKSGESQQT

SEQ ID NO: 3698 - protein, 18 aa, synthetic construct
KTEGWHDSPHKSGQNQQT

SEQ ID NO: 3699 - protein, 18 aa, synthetic construct
KTINGHDSPHKHGQNHQT

SEQ ID NO: 3700 - protein, 18 aa, synthetic construct
KTEQLHDSPHKSGQNQQT

SEQ ID NO: 3701 - protein, 18 aa, synthetic construct
KTIIGHDSPHKSGQYQHT

SEQ ID NO: 3702 - protein, 18 aa, synthetic construct
KTSNGHDSPHKSVQNKQT

SEQ ID NO: 3703 - protein, 18 aa, synthetic construct
KIVNGQVSPHKSGQNQQT

SEQ ID NO: 3704 - protein, 18 aa, synthetic construct
KTVNGHDSPHKSGQRQLT

SEQ ID NO: 3705 - protein, 18 aa, synthetic construct
KTVNGHDSPHKIGQNQLT

SEQ ID NO: 3706 - protein, 18 aa, synthetic construct
KTINGHDSPHKSGQIIVT

SEQ ID NO: 3707 - protein, 18 aa, synthetic construct
KTEKIHDSPHKSGQNQQT

SEQ ID NO: 3708 - protein, 18 aa, synthetic construct
KTENAHDSPHKSGQNQQT

SEQ ID NO: 3709 - protein, 18 aa, synthetic construct
KIGNGHESPHKSGQNQQT

SEQ ID NO: 3710 - protein, 18 aa, synthetic construct
KEVMGHDSPHKSGQNQQT

SEQ ID NO: 3711 - protein, 18 aa, synthetic construct
KTEVKHDSPHKSGQNQQT

SEQ ID NO: 3712 - protein, 18 aa, synthetic construct
KTINGYDSPHKSGQKQST

SEQ ID NO: 3713 - protein, 18 aa, synthetic construct
KYQVGHDSPHKSGQNQQT

SEQ ID NO: 3714 - protein, 18 aa, synthetic construct
KTEAMHDSPHKSGQNQQT

SEQ ID NO: 3715 - protein, 18 aa, synthetic construct
KTIKGDDSPHKSVQNQQT

SEQ ID NO: 3716 - protein, 18 aa, synthetic construct
KTINGHDSPHKSVQSHQT

SEQ ID NO: 3717 - protein, 18 aa, synthetic construct
KTINGHDSPHKSGQFVVT

SEQ ID NO: 3718 - protein, 18 aa, synthetic construct
KTVNGHDSPHKSRQNLQT

SEQ ID NO: 3719 - protein, 18 aa, synthetic construct
KATNGHNSPHKSGQNQET

SEQ ID NO: 3720 - protein, 18 aa, synthetic construct
KAINGHDSPHKSAQNQQI

SEQ ID NO: 3721 - protein, 18 aa, synthetic construct
KTEHGHDSPHKSGQNQQT

SEQ ID NO: 3722 - protein, 18 aa, synthetic construct
KTVENHDSPHKSGQNQQT

SEQ ID NO: 3723 - protein, 18 aa, synthetic construct
KTIYGHDSPHKSGQSQPT

SEQ ID NO: 3724 - protein, 18 aa, synthetic construct
KTISGHESPHKSGQNEQT

SEQ ID NO: 3725 - protein, 18 aa, synthetic construct
KAIIGHDSPHKSAQNQQT

SEQ ID NO: 3726 - protein, 18 aa, synthetic construct
KAIDGHDSPHKSGQNQLT

SEQ ID NO: 3727 - protein, 18 aa, synthetic construct
KTIMGHDSPHKSVQNQQT

SEQ ID NO: 3728 - protein, 18 aa, synthetic construct
KEVGGHDSPHKSGQNQQT

SEQ ID NO: 3729 - protein, 18 aa, synthetic construct
KTINGHDSPHKSAQNLLT

SEQ ID NO: 3730 - protein, 18 aa, synthetic construct
KTEFTHDSPHKSGQNQQT

SEQ ID NO: 3731 - protein, 18 aa, synthetic construct
KSEMGHDSPHKSGQNQQT

SEQ ID NO: 3732 - protein, 18 aa, synthetic construct
KAQQGHDSPHKSGQNQQT

SEQ ID NO: 3733 - protein, 18 aa, synthetic construct
KTEVMHDSPHKSGQNQQT

SEQ ID NO: 3734 - protein, 18 aa, synthetic construct
KAINGHDSPHKSGQSLQT

SEQ ID NO: 3735 - protein, 18 aa, synthetic construct
KCGEGHDSPHKSGQNQQT

SEQ ID NO: 3736 - protein, 18 aa, synthetic construct
KTVNGHDSPHKSAQNHQT

SEQ ID NO: 3737 - protein, 18 aa, synthetic construct
KTVNGHDSPHKSGQTQLT

SEQ ID NO: 3738 - protein, 18 aa, synthetic construct
KTNNGHDSPHKSGRNRQT

SEQ ID NO: 3739 - protein, 18 aa, synthetic construct
KTCNEHDSPHKSGQNQQT

SEQ ID NO: 3740 - protein, 18 aa, synthetic construct
KTINGHDSPHKYGQNEQT

SEQ ID NO: 3741 - protein, 18 aa, synthetic construct
KASNRHDSPHKSGHNQQT

SEQ ID NO: 3742 - protein, 18 aa, synthetic construct
KTETKHDSPHKSGQNQQT

SEQ ID NO: 3743 - protein, 18 aa, synthetic construct
KSINGHDSPHKSQQNQQT

SEQ ID NO: 3744 - protein, 18 aa, synthetic construct
KTIGGHDSPHKSGQNQQI

SEQ ID NO: 3745 - protein, 18 aa, synthetic construct
KTDPQHDSPHKSGQNQQT

SEQ ID NO: 3746 - protein, 18 aa, synthetic construct
KTINRHDSPHKIVQNQQT

SEQ ID NO: 3747 - protein, 18 aa, synthetic construct
KTEQYHDSPHKSGQNQQT

SEQ ID NO: 3748 - protein, 18 aa, synthetic construct
KTINGHDSPHKSVQSKQT

SEQ ID NO: 3749 - protein, 18 aa, synthetic construct
KELVGHDSPHKSGQNQQT

SEQ ID NO: 3750 - protein, 18 aa, synthetic construct
KTENRHDSPHKSGQNQQT

SEQ ID NO: 3751 - protein, 18 aa, synthetic construct
KELMGHDSPHKSGQNQQT

SEQ ID NO: 3752 - protein, 18 aa, synthetic construct
KTINGNDSPHKIGHNQQT

SEQ ID NO: 3753 - protein, 18 aa, synthetic construct
KTEGHHDSPHKSGQNQQT

SEQ ID NO: 3754 - protein, 18 aa, synthetic construct
KTEGYHDSPHKSGQNQQT

SEQ ID NO: 3755 - protein, 18 aa, synthetic construct
KTVNGHDSPHKSGQTQQI

SEQ ID NO: 3756 - protein, 18 aa, synthetic construct
KTINGQDSPHKSGQNPLT

SEQ ID NO: 3757 - protein, 18 aa, synthetic construct
KTINGHDSPHKSGRDQKT

SEQ ID NO: 3758 - protein, 18 aa, synthetic construct
KTINGHDSPHKSVHNQQN

SEQ ID NO: 3759 - protein, 18 aa, synthetic construct
KTINGHDSPHKSGQWKRT

SEQ ID NO: 3760 - protein, 18 aa, synthetic construct
KNEIGHDSPHKSGQNQQT

SEQ ID NO: 3761 - protein, 18 aa, synthetic construct
KAINGHDSPHKSGQSQQI

SEQ ID NO: 3762 - protein, 18 aa, synthetic construct
KIINGHDSPHKSRQAQQT

SEQ ID NO: 3763 - protein, 18 aa, synthetic construct
KTPNGHDSPHKSGQNQQI

SEQ ID NO: 3764 - protein, 18 aa, synthetic construct
KITNGHDSPHKSGQTQQT

SEQ ID NO: 3765 - protein, 18 aa, synthetic construct
KTINGHDSPHKSVQNHQI

SEQ ID NO: 3766 - protein, 18 aa, synthetic construct
KTINGHDSPHKSKQNQQA

SEQ ID NO: 3767 - protein, 18 aa, synthetic construct
KTINGHDSPHKSAQNQLN

SEQ ID NO: 3768 - protein, 18 aa, synthetic construct
KTDITHDSPHKSGQNQQT

SEQ ID NO: 3769 - protein, 18 aa, synthetic construct
KTVNGHDSPHKSGQTQPT

SEQ ID NO: 3770 - protein, 18 aa, synthetic construct
KTEKFHDSPHKSGQNQQT

SEQ ID NO: 3771 - protein, 18 aa, synthetic construct
KTDQGHDSPHKSGQNQQT

SEQ ID NO: 3772 - protein, 18 aa, synthetic construct
KTINGHDSPHKLWINQQT

SEQ ID NO: 3773 - protein, 18 aa, synthetic construct
KGINGPDSPHKSGQNQQT

SEQ ID NO: 3774 - protein, 18 aa, synthetic construct
KSEIGHDSPHKSGQNQQT

SEQ ID NO: 3775 - protein, 18 aa, synthetic construct
KTINGHDSPHKSVQKQLT

SEQ ID NO: 3776 - protein, 18 aa, synthetic construct
KTVNGHDSPHKSGRNQLA

SEQ ID NO: 3777 - protein, 18 aa, synthetic construct
KTNNVHDSPHKSGQNQQS

SEQ ID NO: 3778 - protein, 18 aa, synthetic construct
KSEKGHDSPHKSGQNQQT

SEQ ID NO: 3779 - protein, 18 aa, synthetic construct
KWSAGHDSPHKSGQNQQT

SEQ ID NO: 3780 - protein, 18 aa, synthetic construct
KELAGHDSPHKSGQNQQT

SEQ ID NO: 3781 - protein, 18 aa, synthetic construct
KTINGHDSPHKMGRNQQS

SEQ ID NO: 3782 - protein, 18 aa, synthetic construct
KTDQAHDSPHKSGQNQQT

SEQ ID NO: 3783 - protein, 18 aa, synthetic construct
KTETQHDSPHKSGQNQQT

SEQ ID NO: 3784 - protein, 18 aa, synthetic construct
KTEMTHDSPHKSGQNQQT

SEQ ID NO: 3785 - protein, 18 aa, synthetic construct
KTINGHDSPHKSGISIQT

SEQ ID NO: 3786 - protein, 18 aa, synthetic construct
KTDAVHDSPHKSGQNQQT

SEQ ID NO: 3787 - protein, 18 aa, synthetic construct
KTSNGHDSPHKSVQNLQT

SEQ ID NO: 3788 - protein, 18 aa, synthetic construct
KTEKYHDSPHKSGQNQQT

SEQ ID NO: 3789 - protein, 18 aa, synthetic construct
KQTQGHDSPHKSGQNQQT

SEQ ID NO: 3790 - protein, 18 aa, synthetic construct
KTINGHDSPHKMAHNQQT

SEQ ID NO: 3791 - protein, 18 aa, synthetic construct
KTINGHDSPHKHGQNQQN

SEQ ID NO: 3792 - protein, 18 aa, synthetic construct
KGADGHDSPHKSGQNQQT

SEQ ID NO: 3793 - protein, 18 aa, synthetic construct
KVGEGHDSPHKSGQNQQT

SEQ ID NO: 3794 - protein, 18 aa, synthetic construct
KANEGHDSPHKSGQNQQT

SEQ ID NO: 3795 - protein, 18 aa, synthetic construct
KTDTMHDSPHKSGQNQQT

SEQ ID NO: 3796 - protein, 18 aa, synthetic construct
KTINGHDSPHKSVQSQQS

SEQ ID NO: 3797 - protein, 18 aa, synthetic construct
KTCIAHDSPHKSGQNQQT

SEQ ID NO: 3798 - protein, 18 aa, synthetic construct
KTINGHDSPHKSGQTVCT

SEQ ID NO: 3799 - protein, 18 aa, synthetic construct
KELRGHDSPHKSGQNQQT

SEQ ID NO: 3800 - protein, 18 aa, synthetic construct
KCQIGHDSPHKSGQNQQT

SEQ ID NO: 3801 - protein, 18 aa, synthetic construct
KGVMGHDSPHKSGQNQQT

SEQ ID NO: 3802 - protein, 18 aa, synthetic construct
KACDGHDSPHKSGQNQQT

SEQ ID NO: 3803 - protein, 18 aa, synthetic construct
KTINGQDSPHKSGQYQQI

SEQ ID NO: 3804 - protein, 18 aa, synthetic construct
KTINGHDSPHKSGQQIMT

SEQ ID NO: 3805 - protein, 18 aa, synthetic construct
KTINGHDSPHKSRQNEQS

SEQ ID NO: 3806 - protein, 18 aa, synthetic construct
KASNGHDSPHKSGLNHQT

SEQ ID NO: 3807 - protein, 18 aa, synthetic construct
KTVNGHDSPHKSGQSQPT

SEQ ID NO: 3808 - protein, 18 aa, synthetic construct
KNELGHDSPHKSGQNQQT

SEQ ID NO: 3809 - protein, 18 aa, synthetic construct
KTETFHDSPHKSGQNQQT

SEQ ID NO: 3810 - protein, 18 aa, synthetic construct
KAAEGHDSPHKSGQNQQT

SEQ ID NO: 3811 - protein, 18 aa, synthetic construct
KGQNGHDSPHKSGQNQQT

SEQ ID NO: 3812 - protein, 18 aa, synthetic construct
KNEFGHDSPHKSGQNQQT

SEQ ID NO: 3813 - protein, 18 aa, synthetic construct
KTSIGYDSPHKSGQNQQT

SEQ ID NO: 3814 - protein, 18 aa, synthetic construct
KTDNGHDSPHKSGQNLQT

SEQ ID NO: 3815 - protein, 18 aa, synthetic construct
KTEGQHDSPHKSGQNQQT

SEQ ID NO: 3816 - protein, 18 aa, synthetic construct
KTITGHDSPHKSRQDQQT

SEQ ID NO: 3817 - protein, 18 aa, synthetic construct
KAEHGHDSPHKSGQNQQT

SEQ ID NO: 3818 - protein, 18 aa, synthetic construct
KTINGDDSPHKSGQKQLT

SEQ ID NO: 3819 - protein, 18 aa, synthetic construct
KCDQGHDSPHKSGQNQQT

SEQ ID NO: 3820 - protein, 18 aa, synthetic construct
KEILGHDSPHKSGQNQQT

SEQ ID NO: 3821 - protein, 18 aa, synthetic construct
KTERNHDSPHKSGQNQQT

SEQ ID NO: 3822 - protein, 18 aa, synthetic construct
KAINGDDSPHKSGHNQQT

SEQ ID NO: 3823 - protein, 18 aa, synthetic construct
KTSNGHNSPHKSGQNQET

SEQ ID NO: 3824 - protein, 18 aa, synthetic construct
KTINGHDSPHKSGQMIHT

SEQ ID NO: 3825 - protein, 18 aa, synthetic construct
KNAIGHDSPHKSGQNQQT

SEQ ID NO: 3826 - protein, 18 aa, synthetic construct
KTDKFHDSPHKSGQNQQT

SEQ ID NO: 3827 - protein, 18 aa, synthetic construct
KTEGFHDSPHKSGQNQQT

SEQ ID NO: 3828 - protein, 18 aa, synthetic construct
KVINGHDSPHKSGRNHQS

SEQ ID NO: 3829 - protein, 18 aa, synthetic construct
KTITGHDSPHKSVQNRQT

SEQ ID NO: 3830 - protein, 18 aa, synthetic construct
KTPDMHDSPHKSGQNQQT

SEQ ID NO: 3831 - protein, 18 aa, synthetic construct
KTINGHDSPHKSGQKMNT

SEQ ID NO: 3832 - protein, 18 aa, synthetic construct
KTELQHDSPHKSGQNQQT

SEQ ID NO: 3833 - protein, 18 aa, synthetic construct
KTIHGHDSPHKSGQSQQN

SEQ ID NO: 3834 - protein, 18 aa, synthetic construct
KTEIGHDSPHKSGQNQQT

SEQ ID NO: 3835 - protein, 18 aa, synthetic construct
KTINGHDSPHKSGQYQHA

SEQ ID NO: 3836 - protein, 18 aa, synthetic construct
KTELYHDSPHKSGQNQQT

SEQ ID NO: 3837 - protein, 18 aa, synthetic construct
KTINGRGSPHKRGQNQQT

SEQ ID NO: 3838 - protein, 18 aa, synthetic construct
KTINGHGSPHSKAQNPQT

SEQ ID NO: 3839 - protein, 18 aa, synthetic construct
KTFNGSASPHSKALNQQT

SEQ ID NO: 3840 - protein, 18 aa, synthetic construct
KTINGCGSPHASGQNQQT

SEQ ID NO: 3841 - protein, 18 aa, synthetic construct
KTINGNGSPHSKAQNHQA

SEQ ID NO: 3842 - protein, 18 aa, synthetic construct
KTINGMGSPHSKTQNQQT

SEQ ID NO: 3843 - protein, 18 aa, synthetic construct
KTVNGTGSPHSKAQNQLT

SEQ ID NO: 3844 - protein, 18 aa, synthetic construct
KTIHGNGSPHSKAQNQET

SEQ ID NO: 3845 - protein, 18 aa, synthetic construct
KAINGNGSPHKRGQNQQT

SEQ ID NO: 3846 - protein, 18 aa, synthetic construct
KTINGNGSPHSKAPNLQT

SEQ ID NO: 3847 - protein, 18 aa, synthetic construct
KTIKGGGSPHSKAQDQQT

SEQ ID NO: 3848 - protein, 18 aa, synthetic construct
KTINGHPSPHWKGQNQQT

SEQ ID NO: 3849 - protein, 4 aa, synthetic construct
KNEI

SEQ ID NO: 3850 - protein, 4 aa, synthetic construct
KTPN

SEQ ID NO: 3851 - protein, 4 aa, synthetic construct
KITN

SEQ ID NO: 3852 - protein, 4 aa, synthetic construct
KTDI

SEQ ID NO: 3853 - protein, 4 aa, synthetic construct
KTDQ

SEQ ID NO: 3854 - protein, 4 aa, synthetic construct
KGIN

SEQ ID NO: 3855 - protein, 4 aa, synthetic construct
KSEI

SEQ ID NO: 3856 - protein, 4 aa, synthetic construct
KWSA

SEQ ID NO: 3857 - protein, 4 aa, synthetic construct
KELA

SEQ ID NO: 3858 - protein, 4 aa, synthetic construct
KQTQ

SEQ ID NO: 3859 - protein, 4 aa, synthetic construct
KGAD

SEQ ID NO: 3860 - protein, 4 aa, synthetic construct
KVGE

SEQ ID NO: 3861 - protein, 4 aa, synthetic construct
KANE

SEQ ID NO: 3862 - protein, 4 aa, synthetic construct
KTDT

SEQ ID NO: 3863 - protein, 4 aa, synthetic construct
KTCI

SEQ ID NO: 3864 - protein, 4 aa, synthetic construct
KELR

SEQ ID NO: 3865 - protein, 4 aa, synthetic construct
KCQI

SEQ ID NO: 3866 - protein, 4 aa, synthetic construct
KGVM

SEQ ID NO: 3867 - protein, 4 aa, synthetic construct
KACD

SEQ ID NO: 3868 - protein, 4 aa, synthetic construct
KNEL

SEQ ID NO: 3869 - protein, 4 aa, synthetic construct
KAAE

SEQ ID NO: 3870 - protein, 4 aa, synthetic construct
KGQN

SEQ ID NO: 3871 - protein, 4 aa, synthetic construct
KNEF

SEQ ID NO: 3872 - protein, 4 aa, synthetic construct
KTSI

SEQ ID NO: 3873 - protein, 4 aa, synthetic construct
KCDQ

SEQ ID NO: 3874 - protein, 4 aa, synthetic construct
KEIL

SEQ ID NO: 3875 - protein, 4 aa, synthetic construct
KTPD

SEQ ID NO: 3876 - protein, 4 aa, synthetic construct
SPHK

SEQ ID NO: 3877 - protein, 11 aa, synthetic construct
ERVSGSPHSKA

SEQ ID NO: 3878 - protein, 12 aa, synthetic construct
AEIGHDSPHKSG

SEQ ID NO: 3879 - protein, 11 aa, synthetic construct
ENVSGSPHSKA

SEQ ID NO: 3880 - protein, 27 aa, synthetic construct
KTINGSGQNQQTLKFSVAGPSNMAVQG

SEQ ID NO: 3881 - protein, 12 aa, synthetic construct
KTINGSGQNQQT

SEQ ID NO: 3882 - protein, 9 aa, synthetic construct
NGSGQNQQT

SEQ ID NO: 3883 - DNA, 654 bp, synthetic construct
  source 1..654: mol_type = other DNA
ggggttatttctctactttcgtgtctctgagtgtgcttccagtgcccccctccccccaaaaaatgccttctgagttgaatatcaacactacaaaccgagtatctgcagagggccctgcgtatgagtgcaagtgggttttaggaccaggatgaggcggggtgggggtgcctacctgacgaccgaccccgacccactggacaagcacccaacccccattccccaaattgcgcatcccctatcagagagggggaggggaaacaggatgcggcgaggcgcgtgcgcactgccagcttcagcaccgcggacagtgccttcgcccccgcctggcggcgcgcgccaccgccgcctcagcactgaaggcgcgctgacgtcactcgccggtcccccgcaaactccccttcccggccaccttggtcgcgtccgcgccgccgccggcccagccggaccgcaccacgcgaggcgcgagataggggggcacgggcgcgaccatctgcgctgcggcgccggcgactcagcgctgcctcagtctgcggtgggcagcggaggagtcgtgtcgtgcctgagagcgcagctgtgctcctgggcaccgcgcagtccgcccccgcggctcctggccagaccacccctaggaccccctgccccaagtcgcagcca

SEQ ID NO: 3884 - DNA, 214 bp, synthetic construct
  source 1..214: mol_type = other DNA
gaacgctgacgtcatcaacccgctccaaggaatcgcgggcccagtgtcactaggcgggaacacccagcgcgcgtgcgccctggcaggaagatggctgtgagggacagggagtggcgccctgcaatatttgcatgtcgctatgtgttctgggaaatcaccataaacgtgaaatgtctttggatttgggaatcttataagttctgtatgagaccac

SEQ ID NO: 3885 - DNA, 570 bp, synthetic construct
  source 1..570: mol_type = other DNA
atagtcttctgcacagggcattctttttgcttcaggatgtttacaacatttgctgcccacttttcctaggtttcttgagacctctacaagagttggagttgacacttggggtactttcttggtgtaacgaactaatagcctgaaaaaaagaagtcatgtgttttcagcaaggcaagaaactgtctaacatagtagataaaacagagaacacttggccggaatcaactaagatgttgctatgttccattcatcatattatctccatctgcagagtagtgggttagtggagggtagaaaacattctcctgaacaactagttaaacttggctttgagttccacctgtaccacttgcataatcttgggaaagtgagttgcctaattcagtgacattaataaatttattaatttcttctttcaataaaacctggagagagcttcatatgtatcagcatatgctaaacttgaaagatacaagtagaaaatggaaggaaatatatctgactcaatagggatagttcaagggttaaattaaaagtagtaaagtattataattaatctgacatggtacc

SEQ ID NO: 3886 - DNA, 2300 bp, synthetic construct
  source 1..2300: mol_type = other DNA
ctgcgcgctcgctcgctcactgaggccgcccgggcaaagcccgggcgtcgggcgacctttggtcgcccggcctcagtgagcgagcgagcgcgcagagagggagtgtagccatgctctaggaagatcaattcaattcacgcgtggggttatttctctactttcgtgtctctgagtgtgcttccagtgcccccctccccccaaaaaatgccttctgagttgaatatcaacactacaaaccgagtatctgcagagggccctgcgtatgagtgcaagtgggttttaggaccaggatgaggcggggtgggggtgcctacctgacgaccgaccccgacccactggacaagcacccaacccccattccccaaattgcgcatcccctatcagagagggggaggggaaacaggatgcggcgaggcgcgtgcgcactgccagcttcagcaccgcggacagtgccttcgcccccgcctggcggcgcgcgccaccgccgcctcagcactgaaggcgcgctgacgtcactcgccggtcccccgcaaactccccttcccggccaccttggtcgcgtccgcgccgccgccggcccagccggaccgcaccacgcgaggcgcgagataggggggcacgggcgcgaccatctgcgctgcggcgccggcgactcagcgctgcctcagtctgcggtgggcagcggaggagtcgtgtcgtgcctgagagcgcagctgtgctcctgggcaccgcgcagtccgcccccgcggctcctggccagaccacccctaggaccccctgccccaagtcgcagccaaagcttcgtttagtgaaccgtcagatcgcctggagacgccatccacgctgttttgacctccatagaagacaccgggaccgatccagcctccgcggattcgaatcccggccgggaacggtgcattggaacgcggattccccgtgccaagagtgacgtaagtaccgcctatagagtctataggcccacaaaaaatgctttcttcttttaatatacttttttgtttatcttatttctaatactttccctaatctctttctttcagggcaataatgatacaatgtatcatgcctctttgcaccattctaaagaataacagtgataatttctgggttaaggcaatagcaatatttctgcatataaatatttctgcatataaattgtaactgatgtaagaggtttcatattgctaatagcagctacaatccagctaccattctgcttttattttatggttgggataaggctggattattctgagtccaagctaggcccttttgctaatcatgttcatacctcttatcttcctcccacagctcctgggcaacgtgctggtctgtgtgctggcccatcactttggcaaagaattgggattcgaaccggtgaagcaaagaaggggcagagggagcccgtgagctgagtgggccagggactgggagaaggagtgaggaggcagggccggcatgcctctgctgctggccagagactggaagcgatgacaatctgtctgcacctgtcactagtttgtcatcgcttccagtctttggccgtgtagtgctacccagcgctggctgcctcctcagcattgcaattcctctcccatctgggcaccagtcagctaccctggtgggaatctgggtagccctcgaggggtggcatccctgtgacccctccccagtgcctctcctggccctggaagttgccactccagtgcccaccagccttgtcctaataaaattaagttgcatcattttgtctgactaggtgtccttctataatattatggggtggaggggggtggtatggagcaaggggcaagttgggaagacaacctgtagggcctgcggggtctattgggaaccaagctggagtgcagtggcacaatcttggctcactgcaatctccgcctcctgggttcaagcgattctcctgcctcagcctcccgagttgttgggattccaggcatgcatgaccaggctcagctaatttttgtttttttggtagagacggggtttcaccatattggccaggctggtctccaactcctaatctcaggtgatctacccaccttggcctcccaaattgctgggattacaggcgtgaaccactgctcccttccctgtccttatcgatgcctagggttaatcattaactacaaggaacccctagtgatggagttggccactccctctctgcgcgctcgctcgctcactgaggccgggcgaccaaaggtcgcccgacgcccgggctttgcccgggcggcctcagtgagcgagcgagcgcgcag

SEQ ID NO: 3887 - DNA, 2198 bp, synthetic construct
  source 1..2198: mol_type = other DNA
ctgcgcgctcgctcgctcactgaggccgcccgggcaaagcccgggcgtcgggcgacctttggtcgcccggcctcagtgagcgagcgagcgcgcagagagggagtgtagccatgctctaggaagatcaattcaattcacgcgtggggttatttctctactttcgtgtctctgagtgtgcttccagtgcccccctccccccaaaaaatgccttctgagttgaatatcaacactacaaaccgagtatctgcagagggccctgcgtatgagtgcaagtgggttttaggaccaggatgaggcggggtgggggtgcctacctgacgaccgaccccgacccactggacaagcacccaacccccattccccaaattgcgcatcccctatcagagagggggaggggaaacaggatgcggcgaggcgcgtgcgcactgccagcttcagcaccgcggacagtgccttcgcccccgcctggcggcgcgcgccaccgccgcctcagcactgaaggcgcgctgacgtcactcgccggtcccccgcaaactccccttcccggccaccttggtcgcgtccgcgccgccgccggcccagccggaccgcaccacgcgaggcgcgagataggggggcacgggcgcgaccatctgcgctgcggcgccggcgactcagcgctgcctcagtctgcggtgggcagcggaggagtcgtgtcgtgcctgagagcgcagctgtgctcctgggcaccgcgcagtccgcccccgcggctcctggccagaccacccctaggaccccctgccccaagtcgcagccaaagcttcgtttagtgaaccgtcagatcgcctggagacgccatccacgctgttttgacctccatagaagacaccgggaccgatccagcctccgcggattcgaatcccggccgggaacggtgcattggaacgcggattccccgtgccaagagtgacgtaagtaccgcctatagagtctataggcccacaaaaaatgctttcttcttttaatatacttttttgtttatcttatttctaatactttccctaatctctttctttcagggcaataatgatacaatgtatcatgcctctttgcaccattctaaagaataacagtgataatttctgggttaaggcaatagcaatatttctgcatataaatatttctgcatataaattgtaactgatgtaagaggtttcatattgctaatagcagctacaatccagctaccattctgcttttattttatggttgggataaggctggattattctgagtccaagctaggcccttttgctaatcatgttcatacctcttatcttcctcccacagctcctgggcaacgtgctggtctgtgtgctggcccatcactttggcaaagaattgggattcgaaccggtgtgctgggcggggggcggcgggccctcccgcagaacaccatgcgctcttcggaacctcgcagttcggttaatacctgtgacctggtattaaccgaactgcgaggttctgaggagcgccttgacagcagccatgggagggccgccccctacctcagtgactcgaggggtggcatccctgtgacccctccccagtgcctctcctggccctggaagttgccactccagtgcccaccagccttgtcctaataaaattaagttgcatcattttgtctgactaggtgtccttctataatattatggggtggaggggggtggtatggagcaaggggcaagttgggaagacaacctgtagggcctgcggggtctattgggaaccaagctggagtgcagtggcacaatcttggctcactgcaatctccgcctcctgggttcaagcgattctcctgcctcagcctcccgagttgttgggattccaggcatgcatgaccaggctcagctaatttttgtttttttggtagagacggggtttcaccatattggccaggctggtctccaactcctaatctcaggtgatctacccaccttggcctcccaaattgctgggattacaggcgtgaaccactgctcccttccctgtccttatcgatgcctagggttaatcattaactacaaggaacccctagtgatggagttggccactccctctctgcgcgctcgctcgctcactgaggccgggcgaccaaaggtcgcccgacgcccgggctttgcccgggcggcctcagtgagcgagcgagcgcgcag

SEQ ID NO: 3888 - DNA, 2198 bp, synthetic construct
  source 1..2198: mol_type = other DNA
ctgcgcgctcgctcgctcactgaggccgcccgggcaaagcccgggcgtcgggcgacctttggtcgcccggcctcagtgagcgagcgagcgcgcagagagggagtgtagccatgctctaggaagatcaattcaattcacgcgtggggttatttctctactttcgtgtctctgagtgtgcttccagtgcccccctccccccaaaaaatgccttctgagttgaatatcaacactacaaaccgagtatctgcagagggccctgcgtatgagtgcaagtgggttttaggaccaggatgaggcggggtgggggtgcctacctgacgaccgaccccgacccactggacaagcacccaacccccattccccaaattgcgcatcccctatcagagagggggaggggaaacaggatgcggcgaggcgcgtgcgcactgccagcttcagcaccgcggacagtgccttcgcccccgcctggcggcgcgcgccaccgccgcctcagcactgaaggcgcgctgacgtcactcgccggtcccccgcaaactccccttcccggccaccttggtcgcgtccgcgccgccgccggcccagccggaccgcaccacgcgaggcgcgagataggggggcacgggcgcgaccatctgcgctgcggcgccggcgactcagcgctgcctcagtctgcggtgggcagcggaggagtcgtgtcgtgcctgagagcgcagctgtgctcctgggcaccgcgcagtccgcccccgcggctcctggccagaccacccctaggaccccctgccccaagtcgcagccaaagcttcgtttagtgaaccgtcagatcgcctggagacgccatccacgctgttttgacctccatagaagacaccgggaccgatccagcctccgcggattcgaatcccggccgggaacggtgcattggaacgcggattccccgtgccaagagtgacgtaagtaccgcctatagagtctataggcccacaaaaaatgctttcttcttttaatatacttttttgtttatcttatttctaatactttccctaatctctttctttcagggcaataatgatacaatgtatcatgcctctttgcaccattctaaagaataacagtgataatttctgggttaaggcaatagcaatatttctgcatataaatatttctgcatataaattgtaactgatgtaagaggtttcatattgctaatagcagctacaatccagctaccattctgcttttattttatggttgggataaggctggattattctgagtccaagctaggcccttttgctaatcatgttcatacctcttatcttcctcccacagctcctgggcaacgtgctggtctgtgtgctggcccatcactttggcaaagaattgggattcgaaccggtgtgctgggcggggggcggcgggccctcccgcagaacaccatgcgctcttcggaaagctgaccttccgcgagatcctgtgatttggttctcgcggaaggtcagctttctgaggagcgccttgacagcagccatgggagggccgccccctacctcagtgactcgaggggtggcatccctgtgacccctccccagtgcctctcctggccctggaagttgccactccagtgcccaccagccttgtcctaataaaattaagttgcatcattttgtctgactaggtgtccttctataatattatggggtggaggggggtggtatggagcaaggggcaagttgggaagacaacctgtagggcctgcggggtctattgggaaccaagctggagtgcagtggcacaatcttggctcactgcaatctccgcctcctgggttcaagcgattctcctgcctcagcctcccgagttgttgggattccaggcatgcatgaccaggctcagctaatttttgtttttttggtagagacggggtttcaccatattggccaggctggtctccaactcctaatctcaggtgatctacccaccttggcctcccaaattgctgggattacaggcgtgaaccactgctcccttccctgtccttatcgatgcctagggttaatcattaactacaaggaacccctagtgatggagttggccactccctctctgcgcgctcgctcgctcactgaggccgggcgaccaaaggtcgcccgacgcccgggctttgcccgggcggcctcagtgagcgagcgagcgcgcag

SEQ ID NO: 3889 - DNA, 2198 bp, synthetic construct
  source 1..2198: mol_type = other DNA
ctgcgcgctcgctcgctcactgaggccgcccgggcaaagcccgggcgtcgggcgacctttggtcgcccggcctcagtgagcgagcgagcgcgcagagagggagtgtagccatgctctaggaagatcaattcaattcacgcgtggggttatttctctactttcgtgtctctgagtgtgcttccagtgcccccctccccccaaaaaatgccttctgagttgaatatcaacactacaaaccgagtatctgcagagggccctgcgtatgagtgcaagtgggttttaggaccaggatgaggcggggtgggggtgcctacctgacgaccgaccccgacccactggacaagcacccaacccccattccccaaattgcgcatcccctatcagagagggggaggggaaacaggatgcggcgaggcgcgtgcgcactgccagcttcagcaccgcggacagtgccttcgcccccgcctggcggcgcgcgccaccgccgcctcagcactgaaggcgcgctgacgtcactcgccggtcccccgcaaactccccttcccggccaccttggtcgcgtccgcgccgccgccggcccagccggaccgcaccacgcgaggcgcgagataggggggcacgggcgcgaccatctgcgctgcggcgccggcgactcagcgctgcctcagtctgcggtgggcagcggaggagtcgtgtcgtgcctgagagcgcagctgtgctcctgggcaccgcgcagtccgcccccgcggctcctggccagaccacccctaggaccccctgccccaagtcgcagccaaagcttcgtttagtgaaccgtcagatcgcctggagacgccatccacgctgttttgacctccatagaagacaccgggaccgatccagcctccgcggattcgaatcccggccgggaacggtgcattggaacgcggattccccgtgccaagagtgacgtaagtaccgcctatagagtctataggcccacaaaaaatgctttcttcttttaatatacttttttgtttatcttatttctaatactttccctaatctctttctttcagggcaataatgatacaatgtatcatgcctctttgcaccattctaaagaataacagtgataatttctgggttaaggcaatagcaatatttctgcatataaatatttctgcatataaattgtaactgatgtaagaggtttcatattgctaatagcagctacaatccagctaccattctgcttttattttatggttgggataaggctggattattctgagtccaagctaggcccttttgctaatcatgttcatacctcttatcttcctcccacagctcctgggcaacgtgctggtctgtgtgctggcccatcactttggcaaagaattgggattcgaaccggtgtgctgggcggggggcggcgggccctcccgcagaacaccatgcgctcttcggaacctcgcagttcggttaattcctgtgatttggtattaaccgaactgcgaggttctgaggagcgccttgacagcagccatgggagggccgccccctacctcagtgactcgaggggtggcatccctgtgacccctccccagtgcctctcctggccctggaagttgccactccagtgcccaccagccttgtcctaataaaattaagttgcatcattttgtctgactaggtgtccttctataatattatggggtggaggggggtggtatggagcaaggggcaagttgggaagacaacctgtagggcctgcggggtctattgggaaccaagctggagtgcagtggcacaatcttggctcactgcaatctccgcctcctgggttcaagcgattctcctgcctcagcctcccgagttgttgggattccaggcatgcatgaccaggctcagctaatttttgtttttttggtagagacggggtttcaccatattggccaggctggtctccaactcctaatctcaggtgatctacccaccttggcctcccaaattgctgggattacaggcgtgaaccactgctcccttccctgtccttatcgatgcctagggttaatcattaactacaaggaacccctagtgatggagttggccactccctctctgcgcgctcgctcgctcactgaggccgggcgaccaaaggtcgcccgacgcccgggctttgcccgggcggcctcagtgagcgagcgagcgcgcag

SEQ ID NO: 3890 - DNA, 2198 bp, synthetic construct
  source 1..2198: mol_type = other DNA
ctgcgcgctcgctcgctcactgaggccgcccgggcaaagcccgggcgtcgggcgacctttggtcgcccggcctcagtgagcgagcgagcgcgcagagagggagtgtagccatgctctaggaagatcaattcaattcacgcgtggggttatttctctactttcgtgtctctgagtgtgcttccagtgcccccctccccccaaaaaatgccttctgagttgaatatcaacactacaaaccgagtatctgcagagggccctgcgtatgagtgcaagtgggttttaggaccaggatgaggcggggtgggggtgcctacctgacgaccgaccccgacccactggacaagcacccaacccccattccccaaattgcgcatcccctatcagagagggggaggggaaacaggatgcggcgaggcgcgtgcgcactgccagcttcagcaccgcggacagtgccttcgcccccgcctggcggcgcgcgccaccgccgcctcagcactgaaggcgcgctgacgtcactcgccggtcccccgcaaactccccttcccggccaccttggtcgcgtccgcgccgccgccggcccagccggaccgcaccacgcgaggcgcgagataggggggcacgggcgcgaccatctgcgctgcggcgccggcgactcagcgctgcctcagtctgcggtgggcagcggaggagtcgtgtcgtgcctgagagcgcagctgtgctcctgggcaccgcgcagtccgcccccgcggctcctggccagaccacccctaggaccccctgccccaagtcgcagccaaagcttcgtttagtgaaccgtcagatcgcctggagacgccatccacgctgttttgacctccatagaagacaccgggaccgatccagcctccgcggattcgaatcccggccgggaacggtgcattggaacgcggattccccgtgccaagagtgacgtaagtaccgcctatagagtctataggcccacaaaaaatgctttcttcttttaatatacttttttgtttatcttatttctaatactttccctaatctctttctttcagggcaataatgatacaatgtatcatgcctctttgcaccattctaaagaataacagtgataatttctgggttaaggcaatagcaatatttctgcatataaatatttctgcatataaattgtaactgatgtaagaggtttcatattgctaatagcagctacaatccagctaccattctgcttttattttatggttgggataaggctggattattctgagtccaagctaggcccttttgctaatcatgttcatacctcttatcttcctcccacagctcctgggcaacgtgctggtctgtgtgctggcccatcactttggcaaagaattgggattcgaaccggtgtgctgggcggggggcggcgggccctcccgcagaacaccatgcgctcttcggaagccgtcttcggccaagagccctgtgacctggtctcttggcggaagacggcttctgtggagcgccttgacagcagccatgggagggccgccccctacctcagtgactcgaggggtggcatccctgtgacccctccccagtgcctctcctggccctggaagttgccactccagtgcccaccagccttgtcctaataaaattaagttgcatcattttgtctgactaggtgtccttctataatattatggggtggaggggggtggtatggagcaaggggcaagttgggaagacaacctgtagggcctgcggggtctattgggaaccaagctggagtgcagtggcacaatcttggctcactgcaatctccgcctcctgggttcaagcgattctcctgcctcagcctcccgagttgttgggattccaggcatgcatgaccaggctcagctaatttttgtttttttggtagagacggggtttcaccatattggccaggctggtctccaactcctaatctcaggtgatctacccaccttggcctcccaaattgctgggattacaggcgtgaaccactgctcccttccctgtccttatcgatgcctagggttaatcattaactacaaggaacccctagtgatggagttggccactccctctctgcgcgctcgctcgctcactgaggccgggcgaccaaaggtcgcccgacgcccgggctttgcccgggcggcctcagtgagcgagcgagcgcgcag

SEQ ID NO: 3891 - DNA, 2198 bp, synthetic construct
  source 1..2198: mol_type = other DNA
ctgcgcgctcgctcgctcactgaggccgcccgggcaaagcccgggcgtcgggcgacctttggtcgcccggcctcagtgagcgagcgagcgcgcagagagggagtgtagccatgctctaggaagatcaattcaattcacgcgtggggttatttctctactttcgtgtctctgagtgtgcttccagtgcccccctccccccaaaaaatgccttctgagttgaatatcaacactacaaaccgagtatctgcagagggccctgcgtatgagtgcaagtgggttttaggaccaggatgaggcggggtgggggtgcctacctgacgaccgaccccgacccactggacaagcacccaacccccattccccaaattgcgcatcccctatcagagagggggaggggaaacaggatgcggcgaggcgcgtgcgcactgccagcttcagcaccgcggacagtgccttcgcccccgcctggcggcgcgcgccaccgccgcctcagcactgaaggcgcgctgacgtcactcgccggtcccccgcaaactccccttcccggccaccttggtcgcgtccgcgccgccgccggcccagccggaccgcaccacgcgaggcgcgagataggggggcacgggcgcgaccatctgcgctgcggcgccggcgactcagcgctgcctcagtctgcggtgggcagcggaggagtcgtgtcgtgcctgagagcgcagctgtgctcctgggcaccgcgcagtccgcccccgcggctcctggccagaccacccctaggaccccctgccccaagtcgcagccaaagcttcgtttagtgaaccgtcagatcgcctggagacgccatccacgctgttttgacctccatagaagacaccgggaccgatccagcctccgcggattcgaatcccggccgggaacggtgcattggaacgcggattccccgtgccaagagtgacgtaagtaccgcctatagagtctataggcccacaaaaaatgctttcttcttttaatatacttttttgtttatcttatttctaatactttccctaatctctttctttcagggcaataatgatacaatgtatcatgcctctttgcaccattctaaagaataacagtgataatttctgggttaaggcaatagcaatatttctgcatataaatatttctgcatataaattgtaactgatgtaagaggtttcatattgctaatagcagctacaatccagctaccattctgcttttattttatggttgggataaggctggattattctgagtccaagctaggcccttttgctaatcatgttcatacctcttatcttcctcccacagctcctgggcaacgtgctggtctgtgtgctggcccatcactttggcaaagaattgggattcgaaccggtgtgctgggcggggggcggcgggccctcccgcagaacaccatgcgctcttcggaaagctgaccttccgcgagagcctgtgacctggttctcgcggaaggtcagctttctgtggagcgccttgacagcagccatgggagggccgccccctacctcagtgactcgaggggtggcatccctgtgacccctccccagtgcctctcctggccctggaagttgccactccagtgcccaccagccttgtcctaataaaattaagttgcatcattttgtctgactaggtgtccttctataatattatggggtggaggggggtggtatggagcaaggggcaagttgggaagacaacctgtagggcctgcggggtctattgggaaccaagctggagtgcagtggcacaatcttggctcactgcaatctccgcctcctgggttcaagcgattctcctgcctcagcctcccgagttgttgggattccaggcatgcatgaccaggctcagctaatttttgtttttttggtagagacggggtttcaccatattggccaggctggtctccaactcctaatctcaggtgatctacccaccttggcctcccaaattgctgggattacaggcgtgaaccactgctcccttccctgtccttatcgatgcctagggttaatcattaactacaaggaacccctagtgatggagttggccactccctctctgcgcgctcgctcgctcactgaggccgggcgaccaaaggtcgcccgacgcccgggctttgcccgggcggcctcagtgagcgagcgagcgcgcag

SEQ ID NO: 3892 - DNA, 2300 bp, synthetic construct
  source 1..2300: mol_type = other DNA
ctgcgcgctcgctcgctcactgaggccgcccgggcaaagcccgggcgtcgggcgacctttggtcgcccggcctcagtgagcgagcgagcgcgcagagagggagtgtagccatgctctaggaagatcaattcaattcacgcgtggggttatttctctactttcgtgtctctgagtgtgcttccagtgcccccctccccccaaaaaatgccttctgagttgaatatcaacactacaaaccgagtatctgcagagggccctgcgtatgagtgcaagtgggttttaggaccaggatgaggcggggtgggggtgcctacctgacgaccgaccccgacccactggacaagcacccaacccccattccccaaattgcgcatcccctatcagagagggggaggggaaacaggatgcggcgaggcgcgtgcgcactgccagcttcagcaccgcggacagtgccttcgcccccgcctggcggcgcgcgccaccgccgcctcagcactgaaggcgcgctgacgtcactcgccggtcccccgcaaactccccttcccggccaccttggtcgcgtccgcgccgccgccggcccagccggaccgcaccacgcgaggcgcgagataggggggcacgggcgcgaccatctgcgctgcggcgccggcgactcagcgctgcctcagtctgcggtgggcagcggaggagtcgtgtcgtgcctgagagcgcagctgtgctcctgggcaccgcgcagtccgcccccgcggctcctggccagaccacccctaggaccccctgccccaagtcgcagccaaagcttcgtttagtgaaccgtcagatcgcctggagacgccatccacgctgttttgacctccatagaagacaccgggaccgatccagcctccgcggattcgaatcccggccgggaacggtgcattggaacgcggattccccgtgccaagagtgacgtaagtaccgcctatagagtctataggcccacaaaaaatgctttcttcttttaatatacttttttgtttatcttatttctaatactttccctaatctctttctttcagggcaataatgatacaatgtatcatgcctctttgcaccattctaaagaataacagtgataatttctgggttaaggcaatagcaatatttctgcatataaatatttctgcatataaattgtaactgatgtaagaggtttcatattgctaatagcagctacaatccagctaccattctgcttttattttatggttgggataaggctggattattctgagtccaagctaggcccttttgctaatcatgttcatacctcttatcttcctcccacagctcctgggcaacgtgctggtctgtgtgctggcccatcactttggcaaagaattgggattcgaaccggtgaagcaaagaaggggcagagggagcccgtgagctgagtgggccagggactgggagaaggagtgaggaggcagggccggcatgcctctgctgctggccagagccgtcttccgccaagagtctgtctgcacctgtcactagtctcttggcggaagacggctttggccgtgtagtgctacccagcgctggctgcctcctcagcattgcaattcctctcccatctgggcaccagtcagctaccctggtgggaatctgggtagccctcgaggggtggcatccctgtgacccctccccagtgcctctcctggccctggaagttgccactccagtgcccaccagccttgtcctaataaaattaagttgcatcattttgtctgactaggtgtccttctataatattatggggtggaggggggtggtatggagcaaggggcaagttgggaagacaacctgtagggcctgcggggtctattgggaaccaagctggagtgcagtggcacaatcttggctcactgcaatctccgcctcctgggttcaagcgattctcctgcctcagcctcccgagttgttgggattccaggcatgcatgaccaggctcagctaatttttgtttttttggtagagacggggtttcaccatattggccaggctggtctccaactcctaatctcaggtgatctacccaccttggcctcccaaattgctgggattacaggcgtgaaccactgctcccttccctgtccttatcgatgcctagggttaatcattaactacaaggaacccctagtgatggagttggccactccctctctgcgcgctcgctcgctcactgaggccgggcgaccaaaggtcgcccgacgcccgggctttgcccgggcggcctcagtgagcgagcgagcgcgcag

SEQ ID NO: 3893 - DNA, 1853 bp, synthetic construct
  source 1..1853: mol_type = other DNA
ctgcgcgctcgctcgctcactgaggccgcccgggcaaagcccgggcgtcgggcgacctttggtcgcccggcctcagtgagcgagcgagcgcgcagagagggagtgtagccatgctctaggaagatcaattcaattcacgcgtatagtcttctgcacagggcattctttttgcttcaggatgtttacaacatttgctgcccacttttcctaggtttcttgagacctctacaagagttggagttgacacttggggtactttcttggtgtaacgaactaatagcctgaaaaaaagaagtcatgtgttttcagcaaggcaagaaactgtctaacatagtagataaaacagagaacacttggccggaatcaactaagatgttgctatgttccattcatcatattatctccatctgcagagtagtgggttagtggagggtagaaaacattctcctgaacaactagttaaacttggctttgagttccacctgtaccacttgcataatcttgggaaagtgagttgcctaattcagtgacattaataaatttattaatttcttctttcaataaaacctggagagagcttcatatgtatcagcatatgctaaacttgaaagatacaagtagaaaatggaaggaaatatatctgactcaatagggatagttcaagggttaaattaaaagtagtaaagtattataattaatctgacatggtaccctctagcggccgcaattcgaacgctgacgtcatcaacccgctccaaggaatcgcgggcccagtgtcactaggcgggaacacccagcgcgcgtgcgccctggcaggaagatggctgtgagggacagggagtggcgccctgcaatatttgcatgtcgctatgtgttctgggaaatcaccataaacgtgaaatgtctttggatttgggaatcttataagttctgtatgagaccacaccggtgaagcaaagaaggggcagagggagcccgtgagctgagtgggccagggactgggagaaggagtgaggaggcagggccggcatgcctctgctgctggccagagactggaagcgatgacaatctgtctgcacctgtcactagtttgtcatcgcttccagtctttggccgtgtagtgctacccagcgctggctgcctcctcagcattgcaattcctctcccatctgggcaccagtcagctaccctggtgggaatctgggtagccctcgaggggtggcatccctgtgacccctccccagtgcctctcctggccctggaagttgccactccagtgcccaccagccttgtcctaataaaattaagttgcatcattttgtctgactaggtgtccttctataatattatggggtggaggggggtggtatggagcaaggggcaagttgggaagacaacctgtagggcctgcggggtctattgggaaccaagctggagtgcagtggcacaatcttggctcactgcaatctccgcctcctgggttcaagcgattctcctgcctcagcctcccgagttgttgggattccaggcatgcatgaccaggctcagctaatttttgtttttttggtagagacggggtttcaccatattggccaggctggtctccaactcctaatctcaggtgatctacccaccttggcctcccaaattgctgggattacaggcgtgaaccactgctcccttccctgtccttatcgatgcctagggttaatcattaactacaaggaacccctagtgatggagttggccactccctctctgcgcgctcgctcgctcactgaggccgggcgaccaaaggtcgcccgacgcccgggctttgcccgggcggcctcagtgagcgagcgagcgcgcag

SEQ ID NO: 3894 - protein, 743 aa, synthetic construct
MAADGYLPDWLEDNLSEGIREWWALKPGAPQPKANQQHQDNARGLVLPGYKYLGPGNGLDKGEPVNAADAAALEHDKAYDQQLKAGDNPYLKYNHADAEFQERLKEDTSFGGNLGRAVFQAKKRLLEPLGLVEEAAKTAPGKKRPVEQSPQEPDSSAGIGKSGAQPAKKRLNFGQTGDTESVPDPQPIGEPPAAPSGVGSLTMASGGGAPVADNNEGADGVGSSSGNWHCDSQWLGDRVITTSTRTWALPTYNNHLYKQISNSTSGGSSNDNAYFGYSTPWGYFDFNRFHCHFSPRDWQRLINNNWGFRPKRLNFKLFNIQVKEVTDNNGVKTIANNLTSTVQVFTDSDYQLPYVLGSAHEGCLPPFPADVFMIPQYGYLTLNDGSQAVGRSSFYCLEYFPSQMLRTGNNFQFSYEFENVPFHSSYAHSQSLDRLMNPLIDQYLYYLSRTINGSGQNQQTLKFSVAGPSNMAVQGRNYIPGPSYRQQRVSTTVTQNNNSEFAWPGASSWALNGRNSLMNPGPAMASHKEGEDRFFPLSGSLIFGKQGTGRDNVDADKVMITNEEEIKTTNPVATESYGQVATNHQSDGTLAVPFKAQAQTGWVQNQGILPGMVWQDRDVYLQGPIWAKIPHTDGNFHPSPLMGGFGMKHPPPQILIKNTPVPADPPTAFNKDKLNSFITQYSTGQVSVEIEWELQKENSKRWNPEIQYTSNYYKSNNVEFAVNTEGVYSEPRPIGTRYLTRNL

SEQ ID NO: 3895 - DNA, 22 bp, unidentified
  source 1..22: mol_type = unassigned DNA
agtgaattctaccagtgccata

SEQ ID NO: 3896 - DNA, 23 bp, unidentified
  source 1..23: mol_type = unassigned DNA
acaaacaccattgtcacactcca

SEQ ID NO: 3897 - DNA, 71 bp, unidentified
  source 1..71: mol_type = unassigned DNA
acaaacaccattgtcacactccacacaaacaccattgtcacactccacacaaacaccattgtcacactcca

SEQ ID NO: 3898 - DNA, 24 bp, unidentified
  source 1..24: mol_type = unassigned DNA
agtgtgagttctaccattgccaaa

SEQ ID NO: 3899 - DNA, 23 bp, unidentified
  source 1..23: mol_type = unassigned DNA
agcaaaaatgtgctagtgccaaa

SEQ ID NO: 3900 - DNA, 23 bp, unidentified
  source 1..23: mol_type = unassigned DNA
tccataaagtaggaaacactaca

SEQ ID NO: 3901 - DNA, 2232 bp, synthetic construct
  source 1..2232: mol_type = other DNA
atggctgccgatggttatcttccagattggctcgaggacaaccttagtgaaggaattcgcgagtggtgggctttgaaacctggagcccctcaacccaaggcaaatcaacaacatcaagacaacgctcgaggtcttgtgcttccgggttacaaataccttggacccggcaacggactcgacaagggggagccggtcaacgcagcagacgcggcggccctcgagcacgacaaggcctacgaccagcagctcaaggccggagacaacccgtacctcaagtacaaccacgccgacgccgagttccaggagcggctcaaagaagatacgtcttttgggggcaacctcgggcgagcagtcttccaggccaaaaagaggcttcttgaacctcttggtctggttgaggaagcggctaagacggctcctggaaagaagaggcctgtagagcagtctcctcaggaaccggactcctccgcgggtattggcaaatcgggtgcacagcccgctaaaaagagactcaatttcggtcagactggcgacacagagtcagtcccagaccctcaaccaatcggagaacctcccgcagccccctcaggtgtgggatctcttacaatggcttcaggtggtggcgcaccagtggcagacaataacgaaggtgccgatggagtgggtagttcctcgggaaattggcattgcgattcccaatggctgggggacagagtcatcaccaccagcacccgaacctgggccctgcccacctacaacaatcacctctacaagcaaatctccaacagcacatctggaggatcttcaaatgacaacgcctacttcggctacagcaccccctgggggtattttgacttcaacagattccactgccacttctcaccacgtgactggcagcgactcatcaacaacaactggggattccggcctaagcgactcaacttcaagctcttcaacattcaggtcaaagaggttacggacaacaatggagtcaagaccatcgccaataaccttaccagcacggtccaggtcttcacggactcagactatcagctcccgtacgtgctcgggtcggctcacgagggctgcctcccgccgttcccagcggacgttttcatgattcctcagtacgggtatctgacgcttaatgatggaagccaggccgtgggtcgttcgtccttttactgcctggaatatttcccgtcgcaaatgctaagaacgggtaacaacttccagttcagctacgagtttgagaacgtacctttccatagcagctacgctcacagccaaagcctggaccgactaatgaatccactcatcgaccaatacttgtactatctctcaaagactattaacggttctggacagaatcaacaaacgctaaaattcagtgtggccggacccagcaacatggctgtccagggaagaaactacatacctggacccagctaccgacaacaacgtgtctcaaccactgtgactcaaaacaacaacagcgaatttgcttggcctggagcttcttcttgggctctcaatggacgtaatagcttgatgaatcctggacctgctatggccagccacaaagaaggagaggaccgtttctttcctttgtctggatctttaatttttggcaaacaaggaactggaagagacaacgtggatgcggacaaagtcatgataaccaacgaagaagaaattaaaactactaacccggtagcaacggagtcctatggacaagtggccacaaaccaccagagtccgcttaatggtgccgtccatctttatgctcaggcgcagaccggctgggttcaaaaccaaggaatacttccgggtatggtttggcaggacagagatgtgtacctgcaaggacccatttgggccaaaattcctcacacggacggcaactttcacccttctccgctgatgggagggtttggaatgaagcacccgcctcctcagatcctcatcaaaaacacacctgtacctgccgatcctccaacggccttcaacaaggacaagctgaactctttcatcacccagtattctactggccaagtcagcgtggagatcgagtgggagctgcagaaggaaaacagcaagcggtggaacccggagatccagtacacttccaactattacaagtctaataatgttgaatttgctgttaatactgaaggtgtatatagtgaaccccgccccattggcaccagatacctgactcgtaatctgtaa

SEQ ID NO: 3902 - protein, 18 aa, synthetic construct
KAINGHDSPHKSGQSPQT

SEQ ID NO: 3903 - protein, 18 aa, synthetic construct
KTLNGHDSPHKSGQNLFL

SEQ ID NO: 3904 - protein, 742 aa, synthetic construct
MAADGYLPDWLEDNLSEGIREWWALKPGAPQPKANQQHQDNARGLVLPGYKYLGPGNGLDKGEPVNAADAAALEHDKAYDQQLKAGDNPYLKYNHADAEFQERLKEDTSFGGNLGRAVFQAKKRLLEPLGLVEEAAKTAPGKKRPVEQSPQEPDSSAGIGKSGAQPAKKRLNFGQTGDTESVPDPQPIGEPPAAPSGVGSLTMASGGGAPVADNNEGADGVGSSSGNWHCDSQWLGDRVITTSTRTWALPTYNNHLYKQISNSTSGGSSNDNAYFGYSTPWGYFDFNRFHCHFSPRDWQRLINNNWGFRPKRLNFKLFNIQVKEVTDNNGVKTIANNLTSTVQVFTDSDYQLPYVLGSAHEGCLPPFPADVFMIPQYGYLTLNDGSQAVGRSSFYCLEYFPSQMLRTGNNFQFSYEFENVPFHSSYAHSQSLDRLMNPLIDQYLYYLSKTENVSGSPHSKAQNQQTLKFSVAGPSNMAVQGRNYIPGPSYRQQRVSTTVTQNNNSEFAWPGASSWALNGRNSLMNPGPAMASHKEGEDRFFPLSGSLIFGKQGTGRDNVDADKVMITNEEEIKTTNPVATESYGQVATNHQSAQAQAQTGWVQNQGILPGMVWQDRDVYLQGPIWAKIPHTDGNFHPSPLMGGFGMKHPPPQILIKNTPVPADPPTAFNKDKLNSFITQYSTGQVSVEIEWELQKENSKRWNPEIQYTSNYYKSNNVEFAVNTEGVYSEPRPIGTRYLTRNL

SEQ ID NO: 3905 - protein, 742 aa, synthetic construct
MAADGYLPDWLEDNLSEGIREWWALKPGAPQPKANQQHQDNARGLVLPGYKYLGPGNGLDKGEPVNAADAAALEHDKAYDQQLKAGDNPYLKYNHADAEFQERLKEDTSFGGNLGRAVFQAKKRLLEPLGLVEEAAKTAPGKKRPVEQSPQEPDSSAGIGKSGAQPAKKRLNFGQTGDTESVPDPQPIGEPPAAPSGVGSLTMASGGGAPVADNNEGADGVGSSSGNWHCDSQWLGDRVITTSTRTWALPTYNNHLYKQISNSTSGGSSNDNAYFGYSTPWGYFDFNRFHCHFSPRDWQRLINNNWGFRPKRLNFKLFNIQVKEVTDNNGVKTIANNLTSTVQVFTDSDYQLPYVLGSAHEGCLPPFPADVFMIPQYGYLTLNDGSQAVGRSSFYCLEYFPSQMLRTGNNFQFSYEFENVPFHSSYAHSQSLDRLMNPLIDQYLYYLSKTEKVSGSPHSKAQNQQTLKFSVAGPSNMAVQGRNYIPGPSYRQQRVSTTVTQNNNSEFAWPGASSWALNGRNSLMNPGPAMASHKEGEDRFFPLSGSLIFGKQGTGRDNVDADKVMITNEEEIKTTNPVATESYGQVATNHQSAQAQAQTGWVQNQGILPGMVWQDRDVYLQGPIWAKIPHTDGNFHPSPLMGGFGMKHPPPQILIKNTPVPADPPTAFNKDKLNSFITQYSTGQVSVEIEWELQKENSKRWNPEIQYTSNYYKSNNVEFAVNTEGVYSEPRPIGTRYLTRNL

SEQ ID NO: 3906 - protein, 742 aa, synthetic construct
MAADGYLPDWLEDNLSEGIREWWALKPGAPQPKANQQHQDNARGLVLPGYKYLGPGNGLDKGEPVNAADAAALEHDKAYDQQLKAGDNPYLKYNHADAEFQERLKEDTSFGGNLGRAVFQAKKRLLEPLGLVEEAAKTAPGKKRPVEQSPQEPDSSAGIGKSGAQPAKKRLNFGQTGDTESVPDPQPIGEPPAAPSGVGSLTMASGGGAPVADNNEGADGVGSSSGNWHCDSQWLGDRVITTSTRTWALPTYNNHLYKQISNSTSGGSSNDNAYFGYSTPWGYFDFNRFHCHFSPRDWQRLINNNWGFRPKRLNFKLFNIQVKEVTDNNGVKTIANNLTSTVQVFTDSDYQLPYVLGSAHEGCLPPFPADVFMIPQYGYLTLNDGSQAVGRSSFYCLEYFPSQMLRTGNNFQFSYEFENVPFHSSYAHSQSLDRLMNPLIDQYLYYLSKTINGSGSPHKSGQNKTSLKFSVAGPSNMAVQGRNYIPGPSYRQQRVSTTVTQNNNSEFAWPGASSWALNGRNSLMNPGPAMASHKEGEDRFFPLSGSLIFGKQGTGRDNVDADKVMITNEEEIKTTNPVATESYGQVATNHQSAQAQAQTGWVQNQGILPGMVWQDRDVYLQGPIWAKIPHTDGNFHPSPLMGGFGMKHPPPQILIKNTPVPADPPTAFNKDKLNSFITQYSTGQVSVEIEWELQKENSKRWNPEIQYTSNYYKSNNVEFAVNTEGVYSEPRPIGTRYLTRNL

SEQ ID NO: 3907 - DNA, 2226 bp, synthetic construct
  source 1..2226: mol_type = other DNA
atggctgccgatggttatcttccagattggctcgaggacaaccttagtgaaggaattcgcgagtggtgggctttgaaacctggagcccctcaacccaaggcaaatcaacaacatcaagacaacgctcgaggtcttgtgcttccgggttacaaataccttggacccggcaacggactcgacaagggggagccggtcaacgcagcagacgcggcggccctcgagcacgacaaggcctacgaccagcagctcaaggccggagacaacccgtacctcaagtacaaccacgccgacgccgagttccaggagcggctcaaagaagatacgtcttttgggggcaacctcgggcgagcagtcttccaggccaaaaagaggcttcttgaacctcttggtctggttgaggaagcggctaagacggctcctggaaagaagaggcctgtagagcagtctcctcaggaaccggactcctccgcgggtattggcaaatcgggtgcacagcccgctaaaaagagactcaatttcggtcagactggcgacacagagtcagtcccagaccctcaaccaatcggagaacctcccgcagccccctcaggtgtgggatctcttacaatggcttcaggtggtggcgcaccagtggcagacaataacgaaggtgccgatggagtgggtagttcctcgggaaattggcattgcgattcccaatggctgggggacagagtcatcaccaccagcacccgaacctgggccctgcccacctacaacaatcacctctacaagcaaatctccaacagcacatctggaggatcttcaaatgacaacgcctacttcggctacagcaccccctgggggtattttgacttcaacagattccactgccacttctcaccacgtgactggcagcgactcatcaacaacaactggggattccggcctaagcgactcaacttcaagctcttcaacattcaggtcaaagaggttacggacaacaatggagtcaagaccatcgccaataaccttaccagcacggtccaggtcttcacggactcagactatcagctcccgtacgtgctcgggtcggctcacgagggctgcctcccgccgttcccagcggacgttttcatgattcctcagtacgggtatctgacgcttaatgatggaagccaggccgtgggtcgttcgtccttttactgcctggaatatttcccgtcgcaaatgctaagaacgggtaacaacttccagttcagctacgagtttgagaacgtacctttccatagcagctacgctcacagccaaagcctggaccgactaatgaatccactcatcgatcagtatctgtattacttgagtaagacggagcgtgtgtctggttctccgcattctaaggcgcagaatcagcagacgttgaagttttcggtagctggtcctagcaacatggctgtccagggaagaaactacatacctggacccagctaccgacaacaacgtgtctcaaccactgtgactcaaaacaacaacagcgaatttgcttggcctggagcttcttcttgggctctcaatggacgtaatagcttgatgaatcctggacctgctatggccagccacaaagaaggagaggaccgtttctttcctttgtctggatctttaatttttggcaaacaaggaactggaagagacaacgtggatgcggacaaagtcatgataaccaacgaagaagaaattaaaactactaacccggtagcaacggagtcctatggacaagtggccacaaaccaccagagtgcccaagcacaggcgcagaccggctgggttcaaaaccaaggaatacttccgggtatggtttggcaggacagagatgtgtacctgcaaggacccatttgggccaaaattcctcacacggacggcaactttcacccttctccgctgatgggagggtttggaatgaagcacccgcctcctcagatcctcatcaaaaacacacctgtacctgcggatcctccaacggccttcaacaaggacaagctgaactctttcatcacccagtattctactggccaagtcagcgtggagatcgagtgggagctgcagaaggaaaacagcaagcgctggaacccggagatccagtacacttccaactattacaagtctaataatgttgaatttgctgttaatactgaaggtgtatatagtgaaccccgccccattggcacgcggtatttaacgaggaactta

SEQ ID NO: 3908 - DNA, 2226 bp, synthetic construct
  source 1..2226: mol_type = other DNA
atggctgccgatggttatcttccagattggctcgaggacaaccttagtgaaggaattcgcgagtggtgggctttgaaacctggagcccctcaacccaaggcaaatcaacaacatcaagacaacgctcgaggtcttgtgcttccgggttacaaataccttggacccggcaacggactcgacaagggggagccggtcaacgcagcagacgcggcggccctcgagcacgacaaggcctacgaccagcagctcaaggccggagacaacccgtacctcaagtacaaccacgccgacgccgagttccaggagcggctcaaagaagatacgtcttttgggggcaacctcgggcgagcagtcttccaggccaaaaagaggcttcttgaacctcttggtctggttgaggaagcggctaagacggctcctggaaagaagaggcctgtagagcagtctcctcaggaaccggactcctccgcgggtattggcaaatcgggtgcacagcccgctaaaaagagactcaatttcggtcagactggcgacacagagtcagtcccagaccctcaaccaatcggagaacctcccgcagccccctcaggtgtgggatctcttacaatggcttcaggtggtggcgcaccagtggcagacaataacgaaggtgccgatggagtgggtagttcctcgggaaattggcattgcgattcccaatggctgggggacagagtcatcaccaccagcacccgaacctgggccctgcccacctacaacaatcacctctacaagcaaatctccaacagcacatctggaggatcttcaaatgacaacgcctacttcggctacagcaccccctgggggtattttgacttcaacagattccactgccacttctcaccacgtgactggcagcgactcatcaacaacaactggggattccggcctaagcgactcaacttcaagctcttcaacattcaggtcaaagaggttacggacaacaatggagtcaagaccatcgccaataaccttaccagcacggtccaggtcttcacggactcagactatcagctcccgtacgtgctcgggtcggctcacgagggctgcctcccgccgttcccagcggacgttttcatgattcctcagtacgggtatctgacgcttaatgatggaagccaggccgtgggtcgttcgtccttttactgcctggaatatttcccgtcgcaaatgctaagaacgggtaacaacttccagttcagctacgagtttgagaacgtacctttccatagcagctacgctcacagccaaagcctggaccgactaatgaatccactcatcgatcagtatctgtattacttgagtaaggcggagattggtcatgattctccgcataagtctggtcagaatcagcagacgttgaagttttcggtagctggtcctagcaacatggctgtccagggaagaaactacatacctggacccagctaccgacaacaacgtgtctcaaccactgtgactcaaaacaacaacagcgaatttgcttggcctggagcttcttcttgggctctcaatggacgtaatagcttgatgaatcctggacctgctatggccagccacaaagaaggagaggaccgtttctttcctttgtctggatctttaatttttggcaaacaaggaactggaagagacaacgtggatgcggacaaagtcatgataaccaacgaagaagaaattaaaactactaacccggtagcaacggagtcctatggacaagtggccacaaaccaccagagtgcccaagcacaggcgcagaccggctgggttcaaaaccaaggaatacttccgggtatggtttggcaggacagagatgtgtacctgcaaggacccatttgggccaaaattcctcacacggacggcaactttcacccttctccgctgatgggagggtttggaatgaagcacccgcctcctcagatcctcatcaaaaacacacctgtacctgcggatcctccaacggccttcaacaaggacaagctgaactctttaatcacccagtattctactggccaagtcagcgtggagatcgagtgggagctgcagaaggaaaacagcaagcgctggaacccggagatccagtacacttccaactattacaagtctaataatgttgaatttgctgttaatactgaaggtgtatatagtgaaccccgccccattggcacgcggtatttaacgaggaactta

SEQ ID NO: 3909 - DNA, 2226 bp, synthetic construct
  source 1..2226: mol_type = other DNA
atggctgccgatggttatcttccagattggctcgaggacaaccttagtgaaggaattcgcgagtggtgggctttgaaacctggagcccctcaacccaaggcaaatcaacaacatcaagacaacgctcgaggtcttgtgcttccgggttacaaataccttggacccggcaacggactcgacaagggggagccggtcaacgcagcagacgcggcggccctcgagcacgacaaggcctacgaccagcagctcaaggccggagacaacccgtacctcaagtacaaccacgccgacgccgagttccaggagcggctcaaagaagatacgtcttttgggggcaacctcgggcgagcagtcttccaggccaaaaagaggcttcttgaacctcttggtctggttgaggaagcggctaagacggctcctggaaagaagaggcctgtagagcagtctcctcaggaaccggactcctccgcgggtattggcaaatcgggtgcacagcccgctaaaaagagactcaatttcggtcagactggcgacacagagtcagtcccagaccctcaaccaatcggagaacctcccgcagccccctcaggtgtgggatctcttacaatggcttcaggtggtggcgcaccagtggcagacaataacgaaggtgccgatggagtgggtagttcctcgggaaattggcattgcgattcccaatggctgggggacagagtcatcaccaccagcacccgaacctgggccctgcccacctacaacaatcacctctacaagcaaatctccaacagcacatctggaggatcttcaaatgacaacgcctacttcggctacagcaccccctgggggtattttgacttcaacagattccactgccacttctcaccacgtgactggcagcgactcatcaacaacaactggggattccggcctaagcgactcaacttcaagctcttcaacattcaggtcaaagaggttacggacaacaatggagtcaagaccatcgccaataaccttaccagcacggtccaggtcttcacggactcagactatcagctcccgtacgtgctcgggtcggctcacgagggctgcctcccgccgttcccagcggacgttttcatgattcctcagtacgggtatctgacgcttaatgatggaagccaggccgtgggtcgttcgtccttttactgcctggaatatttcccgtcgcaaatgctaagaacgggtaacaacttccagttcagctacgagtttgagaacgtacctttccatagcagctacgctcacagccaaagcctggaccgactaatgaatccactcatcgatcagtatctgtattacttgagtaagacgattattggttctggttctccgcattctaaggcgcagaatcgtcatacgttgaagttttcggtagctggtcctagcaacatggctgtccagggaagaaactacatacctggacccagctaccgacaacaacgtgtctcaaccactgtgactcaaaacaacaacagcgaatttgcttggcctggagcttcttcttgggctctcaatggacgtaatagcttgatgaatcctggacctgctatggccagccacaaagaaggagaggaccgtttctttcctttgtctggatctttaatttttggcaaacaaggaactggaagagacaacgtggatgcggacaaagtcatgataaccaacgaagaagaaattaaaactactaacccggtagcaacggagtcctatggacaagtggccacaaaccaccagagtgcccaagcacaggcgcagaccggctgggttcaaaaccaaggaatacttccgggtatggtttggcaggacagagatgtgtacctgcaaggacccatttgggccaaaattcctcacacggacggcaactttcacccttctccgctgatgggagggtttggaatgaagcacccgcctcctcagatcctcatcaaaaacacacctgtacctgcggatcctccaacggccttcaacaaggacaagctgaactctttcatcacccagtattctactggccaagtcagcgtggagatcgagtgggagctgcagaaggaaaacagcaagcgctggaacccggagatccagtacacttccaactattacaagtctaataatgttgaatttgctgttaatactgaaggtgtatatagtgaaccccgccccattggcacgcggtatttaacgaggaactta

SEQ ID NO: 3910 - DNA, 2226 bp, synthetic construct
  source 1..2226: mol_type = other DNA
atggctgccgatggttatcttccagattggctcgaggacaaccttagtgaaggaattcgcgagtggtgggctttgaaacctggagcccctcaacccaaggcaaatcaacaacatcaagacaacgctcgaggtcttgtgcttccgggttacaaataccttggacccggcaacggactcgacaagggggagccggtcaacgcagcagacgcggcggccctcgagcacgacaaggcctacgaccagcagctcaaggccggagacaacccgtacctcaagtacaaccacgccgacgccgagttccaggagcggctcaaagaagatacgtcttttgggggcaacctcgggcgagcagtcttccaggccaaaaagaggcttcttgaacctcttggtctggttgaggaagcggctaagacggctcctggaaagaagaggcctgtagagcagtctcctcaggaaccggactcctccgcgggtattggcaaatcgggtgcacagcccgctaaaaagagactcaatttcggtcagactggcgacacagagtcagtcccagaccctcaaccaatcggagaacctcccgcagccccctcaggtgtgggatctcttacaatggcttcaggtggtggcgcaccagtggcagacaataacgaaggtgccgatggagtgggtagttcctcgggaaattggcattgcgattcccaatggctgggggacagagtcatcaccaccagcacccgaacctgggccctgcccacctacaacaatcacctctacaagcaaatctccaacagcacatctggaggatcttcaaatgacaacgcctacttcggctacagcaccccctgggggtattttgacttcaacagattccactgccacttctcaccacgtgactggcagcgactcatcaacaacaactggggattccggcctaagcgactcaacttcaagctcttcaacattcaggtcaaagaggttacggacaacaatggagtcaagaccatcgccaataaccttaccagcacggtccaggtcttcacggactcagactatcagctcccgtacgtgctcgggtcggctcacgagggctgcctcccgccgttcccagcggacgttttcatgattcctcagtacgggtatctgacgcttaatgatggaagccaggccgtgggtcgttcgtccttttactgcctggaatatttcccgtcgcaaatgctaagaacgggtaacaacttccagttcagctacgagtttgagaacgtacctttccatagcagctacgctcacagccaaagcctggaccgactaatgaatccactcatcgatcagtatctgtattacttgagtaagacggagaagatgtctggttctccgcattctaaggcgcagaatcagcagacgttgaagttttcggtagctggtcctagcaacatggctgtccagggaagaaactacatacctggacccagctaccgacaacaacgtgtctcaaccactgtgactcaaaacaacaacagcgaatttgcttggcctggagcttcttcttgggctctcaatggacgtaatagcttgatgaatcctggacctgctatggccagccacaaagaaggagaggaccgtttctttcctttgtctggatctttaatttttggcaaacaaggaactggaagagacaacgtggatgcggacaaagtcatgataaccaacgaagaagaaattaaaactactaacccggtagcaacggagtcctatggacaagtggccacaaaccaccagagtgcccaagcacaggcgcagaccggctgggttcaaaaccaaggaatacttccgggtatggtttggcaggacagagatgtgtacctgcaaggacccatttgggccaaaattcctcacacggacggcaactttcacccttctccgctgatgggagggtttggaatgaagcacccgcctcctcagatcctcatcaaaaacacacctgtacctgcggatcctccaacggccttcaacaaggacaagctgaactctttcatcacccagtattctactggccaagtcagcgtggagatcgagtgggagctgcagaaggaaaacagcaagcgctggaacccggagatccagtacacttccaactattacaagtctaataatgttgaatttgctgttaatactgaaggtgtatatagtgaaccccgccccattggcacgcggtatttaacgaggaactta

SEQ ID NO: 3911 - DNA, 2226 bp, synthetic construct
  source 1..2226: mol_type = other DNA
atggctgccgatggttatcttccagattggctcgaggacaaccttagtgaaggaattcgcgagtggtgggctttgaaacctggagcccctcaacccaaggcaaatcaacaacatcaagacaacgctcgaggtcttgtgcttccgggttacaaataccttggacccggcaacggactcgacaagggggagccggtcaacgcagcagacgcggcggccctcgagcacgacaaggcctacgaccagcagctcaaggccggagacaacccgtacctcaagtacaaccacgccgacgccgagttccaggagcggctcaaagaagatacgtcttttgggggcaacctcgggcgagcagtcttccaggccaaaaagaggcttcttgaacctcttggtctggttgaggaagcggctaagacggctcctggaaagaagaggcctgtagagcagtctcctcaggaaccggactcctccgcgggtattggcaaatcgggtgcacagcccgctaaaaagagactcaatttcggtcagactggcgacacagagtcagtcccagaccctcaaccaatcggagaacctcccgcagccccctcaggtgtgggatctcttacaatggcttcaggtggtggcgcaccagtggcagacaataacgaaggtgccgatggagtgggtagttcctcgggaaattggcattgcgattcccaatggctgggggacagagtcatcaccaccagcacccgaacctgggccctgcccacctacaacaatcacctctacaagcaaatctccaacagcacatctggaggatcttcaaatgacaacgcctacttcggctacagcaccccctgggggtattttgacttcaacagattccactgccacttctcaccacgtgactggcagcgactcatcaacaacaactggggattccggcctaagcgactcaacttcaagctcttcaacattcaggtcaaagaggttacggacaacaatggagtcaagaccatcgccaataaccttaccagcacggtccaggtcttcacggactcagactatcagctcccgtacgtgctcgggtcggctcacgagggctgcctcccgccgttcccagcggacgttttcatgattcctcagtacgggtatctgacgcttaatgatggaagccaggccgtgggtcgttcgtccttttactgcctggaatatttcccgtcgcaaatgctaagaacgggtaacaacttccagttcagctacgagtttgagaacgtacctttccatagcagctacgctcacagccaaagcctggaccgactaatgaatccactcatcgatcagtatctgtattacttgagtaaggagattaatggtcgtggttctccgcattctaaggcgcagaatcagcagacgttgaagttttcggtagctggtcctagcaacatggctgtccagggaagaaactacatacctggacccagctaccgacaacaacgtgtctcaaccactgtgactcaaaacaacaacagcgaatttgcttggcctggagcttcttcttgggctctcaatggacgtaatagcttgatgaatcctggacctgctatggccagccacaaagaaggagaggaccgtttctttcctttgtctggatctttaatttttggcaaacaaggaactggaagagacaacgtggatgcggacaaagtcatgataaccaacgaagaagaaattaaaactactaacccggtagcaacggagtcctatggacaagtggccacaaaccaccagagtgcccaagcacaggcgcagaccggctgggttcaaaaccaaggaatacttccgggtatggtttggcaggacagagatgtgtacctgcaaggacccatttgggccaaaattcctcacacggacggcaactttcacccttctccgctgatgggagggtttggaatgaagcacccgcctcctcagatcctcatcaaaaacacacctgtacctgcggatcctccaacggccttcaacaaggacaagctgaactctttcatcacccagtattctactggccaagtcagcgtggagatcgagtgggagctgcagaaggaaaacagcaagcgctggaacccggagatccagtacacttccaactattacaagtctaataatgttgaatttgctgttaatactgaaggtgtatatagtgaaccccgccccattggcacgcggtatttaacgaggaactta

SEQ ID NO: 3912 - DNA, 2226 bp, synthetic construct
  source 1..2226: mol_type = other DNA
atggctgccgatggttatcttccagattggctcgaggacaaccttagtgaaggaattcgcgagtggtgggctttgaaacctggagcccctcaacccaaggcaaatcaacaacatcaagacaacgctcgaggtcttgtgcttccgggttacaaataccttggacccggcaacggactcgacaagggggagccggtcaacgcagcagacgcggcggccctcgagcacgacaaggcctacgaccagcagctcaaggccggagacaacccgtacctcaagtacaaccacgccgacgccgagttccaggagcggctcaaagaagatacgtcttttgggggcaacctcgggcgagcagtcttccaggccaaaaagaggcttcttgaacctcttggtctggttgaggaagcggctaagacggctcctggaaagaagaggcctgtagagcagtctcctcaggaaccggactcctccgcgggtattggcaaatcgggtgcacagcccgctaaaaagagactcaatttcggtcagactggcgacacagagtcagtcccagaccctcaaccaatcggagaacctcccgcagccccctcaggtgtgggatctcttacaatggcttcaggtggtggcgcaccagtggcagacaataacgaaggtgccgatggagtgggtagttcctcgggaaattggcattgcgattcccaatggctgggggacagagtcatcaccaccagcacccgaacctgggccctgcccacctacaacaatcacctctacaagcaaatctccaacagcacatctggaggatcttcaaatgacaacgcctacttcggctacagcaccccctgggggtattttgacttcaacagattccactgccacttctcaccacgtgactggcagcgactcatcaacaacaactggggattccggcctaagcgactcaacttcaagctcttcaacattcaggtcaaagaggttacggacaacaatggagtcaagaccatcgccaataaccttaccagcacggtccaggtcttcacggactcagactatcagctcccgtacgtgctcgggtcggctcacgagggctgcctcccgccgttcccagcggacgttttcatgattcctcagtacgggtatctgacgcttaatgatggaagccaggccgtgggtcgttcgtccttttactgcctggaatatttcccgtcgcaaatgctaagaacgggtaacaacttccagttcagctacgagtttgagaacgtacctttccatagcagctacgctcacagccaaagcctggaccgactaatgaatccactcatcgatcagtatctgtattacttgagtaagacgtttaatggttctggttctccgcattctaaggcgccgaatctgcagacgttgaagttttcggtagctggtcctagcaacatggctgtccagggaagaaactacatacctggacccagctaccgacaacaacgtgtctcaaccactgtgactcaaaacaacaacagcgaatttgcttggcctggagcttcttcttgggctctcaatggacgtaatagcttgatgaatcctggacctgctatggccagccacaaagaaggagaggaccgtttctttcctttgtctggatctttaatttttggcaaacaaggaactggaagagacaacgtggatgcggacaaagtcatgataaccaacgaagaagaaattaaaactactaacccggtagcaacggagtcctatggacaagtggccacaaaccaccagagtgcccaagcacaggcgcagaccggctgggttcaaaaccaaggaatacttccgggtatggtttggcaggacagagatgtgtacctgcaaggacccatttgggccaaaattcctcacacggacggcaactttcacccttctccgctgatgggagggtttggaatgaagcacccgcctcctcagatcctcatcaaaaacacacctgtacctgcggatcctccaacggccttcaacaaggacaagctgaactctttcatcacccagtattctactggccaagtcagcgtggagatcgagtgggagctgcagaaggaaaacagcaagcgctggaacccggagatccagtacacttccaactattacaagtctaataatgttgaatttgctgttaatactgaaggtgtatatagtgaaccccgccccattggcacgcggtatttaacgaggaactta

SEQ ID NO: 3913 - DNA, 2226 bp, synthetic construct
  source 1..2226: mol_type = other DNA
atggctgccgatggttatcttccagattggctcgaggacaaccttagtgaaggaattcgcgagtggtgggctttgaaacctggagcccctcaacccaaggcaaatcaacaacatcaagacaacgctcgaggtcttgtgcttccgggttacaaataccttggacccggcaacggactcgacaagggggagccggtcaacgcagcagacgcggcggccctcgagcacgacaaggcctacgaccagcagctcaaggccggagacaacccgtacctcaagtacaaccacgccgacgccgagttccaggagcggctcaaagaagatacgtcttttgggggcaacctcgggcgagcagtcttccaggccaaaaagaggcttcttgaacctcttggtctggttgaggaagcggctaagacggctcctggaaagaagaggcctgtagagcagtctcctcaggaaccggactcctccgcgggtattggcaaatcgggtgcacagcccgctaaaaagagactcaatttcggtcagactggcgacacagagtcagtcccagaccctcaaccaatcggagaacctcccgcagccccctcaggtgtgggatctcttacaatggcttcaggtggtggcgcaccagtggcagacaataacgaaggtgccgatggagtgggtagttcctcgggaaattggcattgcgattcccaatggctgggggacagagtcatcaccaccagcacccgaacctgggccctgcccacctacaacaatcacctctacaagcaaatctccaacagcacatctggaggatcttcaaatgacaacgcctacttcggctacagcaccccctgggggtattttgacttcaacagattccactgccacttctcaccacgtgactggcagcgactcatcaacaacaactggggattccggcctaagcgactcaacttcaagctcttcaacattcaggtcaaagaggttacggacaacaatggagtcaagaccatcgccaataaccttaccagcacggtccaggtcttcacggactcagactatcagctcccgtacgtgctcgggtcggctcacgagggctgcctcccgccgttcccagcggacgttttcatgattcctcagtacgggtatctgacgcttaatgatggaagccaggccgtgggtcgttcgtccttttactgcctggaatatttcccgtcgcaaatgctaagaacgggtaacaacttccagttcagctacgagtttgagaacgtacctttccatagcagctacgctcacagccaaagcctggaccgactaatgaatccactcatcgatcagtatctgtattacttgagtaagacggagaagacgtctggttctccgcattctaaggcgcagaatcagcagacgttgaagttttcggtagctggtcctagcaacatggctgtccagggaagaaactacatacctggacccagctaccgacaacaacgtgtctcaaccactgtgactcaaaacaacaacagcgaatttgcttggcctggagcttcttcttgggctctcaatggacgtaatagcttgatgaatcctggacctgctatggccagccacaaagaaggagaggaccgtttctttcctttgtctggatctttaatttttggcaaacaaggaactggaagagacaacgtggatgcggacaaagtcatgataaccaacgaagaagaaattaaaactactaacccggtagcaacggagtcctatggacaagtggccacaaaccaccagagtgcccaagcacaggcgcagaccggctgggttcaaaaccaaggaatacttccgggtatggtttggcaggacagagatgtgtacctgcaaggacccatttgggccaaaattcctcacacggacggcaactttcacccttctccgctgatgggagggtttggaatgaagcacccgcctcctcagatcctcatcaaaaacacacctgtacctgcggatcctccaacggccttcaacaaggacaagctgaactctttcatcacccagtattctactggccaagtcagcgtggagatcgagtgggagctgcagaaggaaaacagcaagcgctggaacccggagatccagtacacttccaactattacaagtctaataatgttgaatttgctgttaatactgaaggtgtatatagtgaaccccgccccattggcacgcggtatttaacgaggaactta

SEQ ID NO: 3914 - DNA, 2226 bp, synthetic construct
  source 1..2226: mol_type = other DNA
atggctgccgatggttatcttccagattggctcgaggacaaccttagtgaaggaattcgcgagtggtgggctttgaaacctggagcccctcaacccaaggcaaatcaacaacatcaagacaacgctcgaggtcttgtgcttccgggttacaaataccttggacccggcaacggactcgacaagggggagccggtcaacgcagcagacgcggcggccctcgagcacgacaaggcctacgaccagcagctcaaggccggagacaacccgtacctcaagtacaaccacgccgacgccgagttccaggagcggctcaaagaagatacgtcttttgggggcaacctcgggcgagcagtcttccaggccaaaaagaggcttcttgaacctcttggtctggttgaggaagcggctaagacggctcctggaaagaagaggcctgtagagcagtctcctcaggaaccggactcctccgcgggtattggcaaatcgggtgcacagcccgctaaaaagagactcaatttcggtcagactggcgacacagagtcagtcccagaccctcaaccaatcggagaacctcccgcagccccctcaggtgtgggatctcttacaatggcttcaggtggtggcgcaccagtggcagacaataacgaaggtgccgatggagtgggtagttcctcgggaaattggcattgcgattcccaatggctgggggacagagtcatcaccaccagcacccgaacctgggccctgcccacctacaacaatcacctctacaagcaaatctccaacagcacatctggaggatcttcaaatgacaacgcctacttcggctacagcaccccctgggggtattttgacttcaacagattccactgccacttctcaccacgtgactggcagcgactcatcaacaacaactggggattccggcctaagcgactcaacttcaagctcttcaacattcaggtcaaagaggttacggacaacaatggagtcaagaccatcgccaataaccttaccagcacggtccaggtcttcacggactcagactatcagctcccgtacgtgctcgggtcggctcacgagggctgcctcccgccgttcccagcggacgttttcatgattcctcagtacgggtatctgacgcttaatgatggaagccaggccgtgggtcgttcgtccttttactgcctggaatatttcccgtcgcaaatgctaagaacgggtaacaacttccagttcagctacgagtttgagaacgtacctttccatagcagctacgctcacagccaaagcctggaccgactaatgaatccactcatcgatcagtatctgtattacttgagtaagacgatgaatggtcatgattctccgcattctaaggcgcagaatcagcagacgttgaagttttcggtagctggtcctagcaacatggctgtccagggaagaaactacatacctggacccagctaccgacaacaacgtgtctcaaccactgtgactcaaaacaacaacagcgaatttgcttggcctggagcttcttcttgggctctcaatggacgtaatagcttgatgaatcctggacctgctatggccagccacaaagaaggagaggaccgtttctttcctttgtctggatctttaatttttggcaaacaaggaactggaagagacaacgtggatgcggacaaagtcatgataaccaacgaagaagaaattaaaactactaacccggtagcaacggagtcctatggacaagtggccacaaaccaccagagtgcccaagcacaggcgcagaccggctgggttcaaaaccaaggaatacttccgggtatggtttggcaggacagagatgtgtacctgcaaggacccatttgggccaaaattcctcacacggacggcaactttcacccttctccgctgatgggagggtttggaatgaagcacccgcctcctcagatcctcatcaaaaacacacctgtacctgcggatcctccaacggccttcaacaaggacaagctgaactctttcatcacccagtattctactggccaagtcagcgtggagatcgagtgggagctgcagaaggaaaacagcaagcgctggaacccggagatccagtacacttccaactattacaagtctaataatgttgaatttgctgttaatactgaaggtgtatatagtgaaccccgccccattggcacgcggtatttaacgaggaactta

SEQ ID NO: 3915 - DNA, 2226 bp, synthetic construct
  source 1..2226: mol_type = other DNA
atggctgccgatggttatcttccagattggctcgaggacaaccttagtgaaggaattcgcgagtggtgggctttgaaacctggagcccctcaacccaaggcaaatcaacaacatcaagacaacgctcgaggtcttgtgcttccgggttacaaataccttggacccggcaacggactcgacaagggggagccggtcaacgcagcagacgcggcggccctcgagcacgacaaggcctacgaccagcagctcaaggccggagacaacccgtacctcaagtacaaccacgccgacgccgagttccaggagcggctcaaagaagatacgtcttttgggggcaacctcgggcgagcagtcttccaggccaaaaagaggcttcttgaacctcttggtctggttgaggaagcggctaagacggctcctggaaagaagaggcctgtagagcagtctcctcaggaaccggactcctccgcgggtattggcaaatcgggtgcacagcccgctaaaaagagactcaatttcggtcagactggcgacacagagtcagtcccagaccctcaaccaatcggagaacctcccgcagccccctcaggtgtgggatctcttacaatggcttcaggtggtggcgcaccagtggcagacaataacgaaggtgccgatggagtgggtagttcctcgggaaattggcattgcgattcccaatggctgggggacagagtcatcaccaccagcacccgaacctgggccctgcccacctacaacaatcacctctacaagcaaatctccaacagcacatctggaggatcttcaaatgacaacgcctacttcggctacagcaccccctgggggtattttgacttcaacagattccactgccacttctcaccacgtgactggcagcgactcatcaacaacaactggggattccggcctaagcgactcaacttcaagctcttcaacattcaggtcaaagaggttacggacaacaatggagtcaagaccatcgccaataaccttaccagcacggtccaggtcttcacggactcagactatcagctcccgtacgtgctcgggtcggctcacgagggctgcctcccgccgttcccagcggacgttttcatgattcctcagtacgggtatctgacgcttaatgatggaagccaggccgtgggtcgttcgtccttttactgcctggaatatttcccgtcgcaaatgctaagaacgggtaacaacttccagttcagctacgagtttgagaacgtacctttccatagcagctacgctcacagccaaagcctggaccgactaatgaatccactcatcgatcagtatctgtattacttgagtaagacgattgatggtcatgattctccgcattctaaggcgcagaatcagcagacgttgaagttttcggtagctggtcctagcaacatggctgtccagggaagaaactacatacctggacccagctaccgacaacaacgtgtctcaaccactgtgactcaaaacaacaacagcgaatttgcttggcctggagcttcttcttgggctctcaatggacgtaatagcttgatgaatcctggacctgctatggccagccacaaagaaggagaggaccgtttctttcctttgtctggatctttaatttttggcaaacaaggaactggaagagacaacgtggatgcggacaaagtcatgataaccaacgaagaagaaattaaaactactaacccggtagcaacggagtcctatggacaagtggccacaaaccaccagagtgcccaagcacaggcgcagaccggctgggttcaaaaccaaggaatacttccgggtatggtttggcaggacagagatgtgtacctgcaaggacccatttgggccaaaattcctcacacggacggcaactttcacccttctccgctgatgggagggtttggaatgaagcacccgcctcctcagatcctcatcaaaaacacacctgtacctgcggatcctccaacggccttcaacaaggacaagctgaactctttcatcacccagtattctactggccaagtcagcgtggagatcgagtgggagctgcagaaggaaaacagcaagcgctggaacccggagatccagtacacttccaactattacaagtctaataatgttgaatttgctgttaatactgaaggtgtatatagtgaaccccgccccattggcacgcggtatttaacgaggaactta

SEQ ID NO: 3916 - DNA, 2226 bp, synthetic construct
  source 1..2226: mol_type = other DNA
atggctgccgatggttatcttccagattggctcgaggacaaccttagtgaaggaattcgcgagtggtgggctttgaaacctggagcccctcaacccaaggcaaatcaacaacatcaagacaacgctcgaggtcttgtgcttccgggttacaaataccttggacccggcaacggactcgacaagggggagccggtcaacgcagcagacgcggcggccctcgagcacgacaaggcctacgaccagcagctcaaggccggagacaacccgtacctcaagtacaaccacgccgacgccgagttccaggagcggctcaaagaagatacgtcttttgggggcaacctcgggcgagcagtcttccaggccaaaaagaggcttcttgaacctcttggtctggttgaggaagcggctaagacggctcctggaaagaagaggcctgtagagcagtctcctcaggaaccggactcctccgcgggtattggcaaatcgggtgcacagcccgctaaaaagagactcaatttcggtcagactggcgacacagagtcagtcccagaccctcaaccaatcggagaacctcccgcagccccctcaggtgtgggatctcttacaatggcttcaggtggtggcgcaccagtggcagacaataacgaaggtgccgatggagtgggtagttcctcgggaaattggcattgcgattcccaatggctgggggacagagtcatcaccaccagcacccgaacctgggccctgcccacctacaacaatcacctctacaagcaaatctccaacagcacatctggaggatcttcaaatgacaacgcctacttcggctacagcaccccctgggggtattttgacttcaacagattccactgccacttctcaccacgtgactggcagcgactcatcaacaacaactggggattccggcctaagcgactcaacttcaagctcttcaacattcaggtcaaagaggttacggacaacaatggagtcaagaccatcgccaataaccttaccagcacggtccaggtcttcacggactcagactatcagctcccgtacgtgctcgggtcggctcacgagggctgcctcccgccgttcccagcggacgttttcatgattcctcagtacgggtatctgacgcttaatgatggaagccaggccgtgggtcgttcgtccttttactgcctggaatatttcccgtcgcaaatgctaagaacgggtaacaacttccagttcagctacgagtttgagaacgtacctttccatagcagctacgctcacagccaaagcctggaccgactaatgaatccactcatcgatcagtatctgtattacttgagtaagacgaataatggtcatgattctccgcattctaaggcgcagaatcagcagacgttgaagttttcggtagctggtcctagcaacatggctgtccagggaagaaactacatacctggacccagctaccgacaacaacgtgtctcaaccactgtgactcaaaacaacaacagcgaatttgcttggcctggagcttcttcttgggctctcaatggacgtaatagcttgatgaatcctggacctgctatggccagccacaaagaaggagaggaccgtttctttcctttgtctggatctttaatttttggcaaacaaggaactggaagagacaacgtggatgcggacaaagtcatgataaccaacgaagaagaaattaaaactactaacccggtagcaacggagtcctatggacaagtggccacaaaccaccagagtgcccaagcacaggcgcagaccggctgggttcaaaaccaaggaatacttccgggtatggtttggcaggacagagatgtgtacctgcaaggacccatttgggccaaaattcctcacacggacggcaactttcacccttctccgctgatgggagggtttggaatgaagcacccgcctcctcagatcctcatcaaaaacacacctgtacctgcggatcctccaacggccttcaacaaggacaagctgaactctttcatcacccagtattctactggccaagtcagcgtggagatcgagtgggagctgcagaaggaaaacagcaagcgctggaacccggagatccagtacacttccaactattacaagtctaataatgttgaatttgctgttaatactgaaggtgtatatagtgaaccccgccccattggcacgcggtatttaacgaggaactta

SEQ ID NO: 3917 - DNA, 21 bp, synthetic construct
  source 1..21: mol_type = other DNA
  misc_feature 1..19: note = RNA
  misc_feature 20..21: note = DNA
taggtctgtagatgggacatt

SEQ ID NO: 3918 - DNA, 21 bp, synthetic construct
  source 1..21: mol_type = other DNA
  misc_feature 1..19: note = RNA
  misc_feature 20..21: note = DNA
tcccagttggatgagtggatt

SEQ ID NO: 3919 - DNA, 21 bp, synthetic construct
  source 1..21: mol_type = other DNA
  misc_feature 1..19: note = RNA
  misc_feature 20..21: note = DNA
ttccccccatagcacaacatt

SEQ ID NO: 3920 - DNA, 21 bp, synthetic construct
  source 1..21: mol_type = other DNA
  misc_feature 1..19: note = RNA
  misc_feature 20..21: note = DNA
tccaagggggtgtgttccctt

SEQ ID NO: 3921 - DNA, 21 bp, synthetic construct
  source 1..21: mol_type = other DNA
  misc_feature 1..19: note = RNA
  misc_feature 20..21: note = DNA
tccacccatcaatttggaatt

SEQ ID NO: 3922 - DNA, 21 bp, synthetic construct
  source 1..21: mol_type = other DNA
  misc_feature 1..19: note = RNA
  misc_feature 20..21: note = DNA
tcatgtcgatgctgccggttt

SEQ ID NO: 3923 - DNA, 21 bp, synthetic construct
  source 1..21: mol_type = other DNA
  misc_feature 1..19: note = RNA
  misc_feature 20..21: note = DNA
tcctcgcgccgcaagccagtt

SEQ ID NO: 3924 - DNA, 21 bp, synthetic construct
  source 1..21: mol_type = other DNA
  misc_feature 1..19: note = RNA
  misc_feature 20..21: note = DNA
tatgttaactatcttacactt

SEQ ID NO: 3925 - DNA, 21 bp, synthetic construct
  source 1..21: mol_type = other DNA
  misc_feature 1..19: note = RNA
  misc_feature 20..21: note = DNA
tcgcttcagtcctaatccttt

SEQ ID NO: 3926 - DNA, 21 bp, synthetic construct
  source 1..21: mol_type = other DNA
  misc_feature 1..19: note = RNA
  misc_feature 20..21: note = DNA
tttaactatcttacacatttt

SEQ ID NO: 3927 - DNA, 21 bp, synthetic construct
  source 1..21: mol_type = other DNA
  misc_feature 1..19: note = RNA
  misc_feature 20..21: note = DNA
tcatgatcttaggctggcctt

SEQ ID NO: 3928 - DNA, 21 bp, synthetic construct
  source 1..21: mol_type = other DNA
  misc_feature 1..19: note = RNA
  misc_feature 20..21: note = DNA
tgtcaatttaaatggaacttt

SEQ ID NO: 3929 - DNA, 21 bp, synthetic construct
  source 1..21: mol_type = other DNA
  misc_feature 1..19: note = RNA
  misc_feature 20..21: note = DNA
tgaagtcaatttaaatggatt

SEQ ID NO: 3930 - DNA, 21 bp, synthetic construct
  source 1..21: mol_type = other DNA
  misc_feature 1..19: note = RNA
  misc_feature 20..21: note = DNA
tacacctcgtgagggtgggtt

SEQ ID NO: 3931 - DNA, 21 bp, synthetic construct
  source 1..21: mol_type = other DNA
  misc_feature 1..19: note = RNA
  misc_feature 20..21: note = DNA
tgaaagctaagctaagatgtt

SEQ ID NO: 3932 - DNA, 21 bp, synthetic construct
  source 1..21: mol_type = other DNA
  misc_feature 1..19: note = RNA
  misc_feature 20..21: note = DNA
taaactcatggggctaagttt

SEQ ID NO: 3933 - DNA, 21 bp, synthetic construct
  source 1..21: mol_type = other DNA
  misc_feature 1..19: note = RNA
  misc_feature 20..21: note = DNA
tgatcaccctaaaccatgatt

SEQ ID NO: 3934 - DNA, 21 bp, synthetic construct
  source 1..21: mol_type = other DNA
  misc_feature 1..19: note = RNA
  misc_feature 20..21: note = DNA
ttaatcctgtgcttcaggctt

SEQ ID NO: 3935 - DNA, 21 bp, synthetic construct
  source 1..21: mol_type = other DNA
  misc_feature 1..19: note = RNA
  misc_feature 20..21: note = DNA
taatttcaccctcagtatgtt

SEQ ID NO: 3936 - protein, 758 aa, Homo sapiens
MAEPRQEFEVMEDHAGTYGLGDRKDQGGYTMHQDQEGDTDAGLKESPLQTPTEDGSEEPGSETSDAKSTPTAEDVTAPLVDEGAPGKQAAAQPHTEIPEGTTAEEAGIGDTPSLEDEAAGHVTQEPESGKVVQEGFLREPGPPGLSHQLMSGMPGAPLLPEGPREATRQPSGTGPEDTEGGRHAPELLKHQLLGDLHQEGPPLKGAGGKERPGSKEEVDEDRDVDESSPQDSPPSKASPAQDGRPPQTAAREATSIPGFPAEGAIPLPVDFLSKVSTEIPASEPDGPSVGRAKGQDAPLEFTFHVEITPNVQKEQAHSEEHLGRAAFPGAPGEGPEARGPSLGEDTKEADLPEPSEKQPAAAPRGKPVSRVPQLKARMVSKSKDGTGSDDKKAKTSTRSSAKTLKNRPCLSPKHPTPGSSDPLIQPSSPAVCPEPPSSPKYVSSVTSRTGSSGAKEMKLKGADGKTKIATPRGAAPPGQKGQANATRIPAKTPPAPKTPPSSGEPPKSGDRSGYSSPGSPGTPGSRSRTPSLPTPPTREPKKVAVVRTPPKSPSSAKSRLQTAPVPMPDLKNVKSKIGSTENLKHQPGGGKVQIINKKLDLSNVQSKCGSKDNIKHVPGGGSVQIVYKPVDLSKVTSKCGSLGNIHHKPGGGQVEVKSEKLDFKDRVQSKIGSLDNITHVPGGGNKKIETHKLTFRENAKAKTDHGAEIVYKSPVVSGDTSPRHLSNVSSTGSIDMVDSPQLATLADEVSASLAKQGL

SEQ ID NO: 3937 - protein, 441 aa, Homo sapiens
MAEPRQEFEVMEDHAGTYGLGDRKDQGGYTMHQDQEGDTDAGLKESPLQTPTEDGSEEPGSETSDAKSTPTAEDVTAPLVDEGAPGKQAAAQPHTEIPEGTTAEEAGIGDTPSLEDEAAGHVTQARMVSKSKDGTGSDDKKAKGADGKTKIATPRGAAPPGQKGQANATRIPAKTPPAPKTPPSSGEPPKSGDRSGYSSPGSPGTPGSRSRTPSLPTPPTREPKKVAVVRTPPKSPSSAKSRLQTAPVPMPDLKNVKSKIGSTENLKHQPGGGKVQIINKKLDLSNVQSKCGSKDNIKHVPGGGSVQIVYKPVDLSKVTSKCGSLGNIHHKPGGGQVEVKSEKLDFKDRVQSKIGSLDNITHVPGGGNKKIETHKLTFRENAKAKTDHGAEIVYKSPVVSGDTSPRHLSNVSSTGSIDMVDSPQLATLADEVSASLAKQGL

SEQ ID NO: 3938 - protein, 383 aa, Homo sapiens
MAEPRQEFEVMEDHAGTYGLGDRKDQGGYTMHQDQEGDTDAGLKAEEAGIGDTPSLEDEAAGHVTQARMVSKSKDGTGSDDKKAKGADGKTKIATPRGAAPPGQKGQANATRIPAKTPPAPKTPPSSGEPPKSGDRSGYSSPGSPGTPGSRSRTPSLPTPPTREPKKVAVVRTPPKSPSSAKSRLQTAPVPMPDLKNVKSKIGSTENLKHQPGGGKVQIINKKLDLSNVQSKCGSKDNIKHVPGGGSVQIVYKPVDLSKVTSKCGSLGNIHHKPGGGQVEVKSEKLDFKDRVQSKIGSLDNITHVPGGGNKKIETHKLTFRENAKAKTDHGAEIVYKSPVVSGDTSPRHLSNVSSTGSIDMVDSPQLATLADEVSASLAKQGL

SEQ ID NO: 3939 - protein, 352 aa, Homo sapiens
MAEPRQEFEVMEDHAGTYGLGDRKDQGGYTMHQDQEGDTDAGLKAEEAGIGDTPSLEDEAAGHVTQARMVSKSKDGTGSDDKKAKGADGKTKIATPRGAAPPGQKGQANATRIPAKTPPAPKTPPSSGEPPKSGDRSGYSSPGSPGTPGSRSRTPSLPTPPTREPKKVAVVRTPPKSPSSAKSRLQTAPVPMPDLKNVKSKIGSTENLKHQPGGGKVQIVYKPVDLSKVTSKCGSLGNIHHKPGGGQVEVKSEKLDFKDRVQSKIGSLDNITHVPGGGNKKIETHKLTFRENAKAKTDHGAEIVYKSPVVSGDTSPRHLSNVSSTGSIDMVDSPQLATLADEVSASLAKQGL

SEQ ID NO: 3940 - protein, 412 aa, Homo sapiens
MAEPRQEFEVMEDHAGTYGLGDRKDQGGYTMHQDQEGDTDAGLKESPLQTPTEDGSEEPGSETSDAKSTPTAEAEEAGIGDTPSLEDEAAGHVTQARMVSKSKDGTGSDDKKAKGADGKTKIATPRGAAPPGQKGQANATRIPAKTPPAPKTPPSSGEPPKSGDRSGYSSPGSPGTPGSRSRTPSLPTPPTREPKKVAVVRTPPKSPSSAKSRLQTAPVPMPDLKNVKSKIGSTENLKHQPGGGKVQIINKKLDLSNVQSKCGSKDNIKHVPGGGSVQIVYKPVDLSKVTSKCGSLGNIHHKPGGGQVEVKSEKLDFKDRVQSKIGSLDNITHVPGGGNKKIETHKLTFRENAKAKTDHGAEIVYKSPVVSGDTSPRHLSNVSSTGSIDMVDSPQLATLADEVSASLAKQGL

SEQ ID NO: 3941 - protein, 776 aa, Homo sapiens
MAEPRQEFEVMEDHAGTYGLGDRKDQGGYTMHQDQEGDTDAGLKESPLQTPTEDGSEEPGSETSDAKSTPTAEDVTAPLVDEGAPGKQAAAQPHTEIPEGTTAEEAGIGDTPSLEDEAAGHVTQEPESGKVVQEGFLREPGPPGLSHQLMSGMPGAPLLPEGPREATRQPSGTGPEDTEGGRHAPELLKHQLLGDLHQEGPPLKGAGGKERPGSKEEVDEDRDVDESSPQDSPPSKASPAQDGRPPQTAAREATSIPGFPAEGAIPLPVDFLSKVSTEIPASEPDGPSVGRAKGQDAPLEFTFHVEITPNVQKEQAHSEEHLGRAAFPGAPGEGPEARGPSLGEDTKEADLPEPSEKQPAAAPRGKPVSRVPQLKARMVSKSKDGTGSDDKKAKTSTRSSAKTLKNRPCLSPKHPTPGSSDPLIQPSSPAVCPEPPSSPKYVSSVTSRTGSSGAKEMKLKGADGKTKIATPRGAAPPGQKGQANATRIPAKTPPAPKTPPSSATKQVQRRPPPAGPRSERGEPPKSGDRSGYSSPGSPGTPGSRSRTPSLPTPPTREPKKVAVVRTPPKSPSSAKSRLQTAPVPMPDLKNVKSKIGSTENLKHQPGGGKVQIINKKLDLSNVQSKCGSKDNIKHVPGGGSVQIVYKPVDLSKVTSKCGSLGNIHHKPGGGQVEVKSEKLDFKDRVQSKIGSLDNITHVPGGGNKKIETHKLTFRENAKAKTDHGAEIVYKSPVVSGDTSPRHLSNVSSTGSIDMVDSPQLATLADEVSASLAKQGL

SEQ ID NO: 3942 - protein, 381 aa, Homo sapiens
MAEPRQEFEVMEDHAGTYGLGDRKDQGGYTMHQDQEGDTDAGLKESPLQTPTEDGSEEPGSETSDAKSTPTAEAEEAGIGDTPSLEDEAAGHVTQARMVSKSKDGTGSDDKKAKGADGKTKIATPRGAAPPGQKGQANATRIPAKTPPAPKTPPSSGEPPKSGDRSGYSSPGSPGTPGSRSRTPSLPTPPTREPKKVAVVRTPPKSPSSAKSRLQTAPVPMPDLKNVKSKIGSTENLKHQPGGGKVQIVYKPVDLSKVTSKCGSLGNIHHKPGGGQVEVKSEKLDFKDRVQSKIGSLDNITHVPGGGNKKIETHKLTFRENAKAKTDHGAEIVYKSPVVSGDTSPRHLSNVSSTGSIDMVDSPQLATLADEVSASLAKQGL

SEQ ID NO: 3943 - protein, 410 aa, Homo sapiens
MAEPRQEFEVMEDHAGTYGLGDRKDQGGYTMHQDQEGDTDAGLKESPLQTPTEDGSEEPGSETSDAKSTPTAEDVTAPLVDEGAPGKQAAAQPHTEIPEGTTAEEAGIGDTPSLEDEAAGHVTQARMVSKSKDGTGSDDKKAKGADGKTKIATPRGAAPPGQKGQANATRIPAKTPPAPKTPPSSGEPPKSGDRSGYSSPGSPGTPGSRSRTPSLPTPPTREPKKVAVVRTPPKSPSSAKSRLQTAPVPMPDLKNVKSKIGSTENLKHQPGGGKVQIVYKPVDLSKVTSKCGSLGNIHHKPGGGQVEVKSEKLDFKDRVQSKIGSLDNITHVPGGGNKKIETHKLTFRENAKAKTDHGAEIVYKSPVVSGDTSPRHLSNVSSTGSIDMVDSPQLATLADEVSASLAKQGL

SEQ ID NO: 3944 - DNA, 6762 bp, Homo sapiens
  source 1..6762: mol_type = genomic DNA
ggacggccgagcggcagggcgctcgcgcgcgcccactagtggccggaggagaaggctcccgcggaggccgcgctgcccgccccctcccctggggaggctcgcgttcccgctgctcgcgcctgcgccgcccgccggcctcaggaacgcgccctcttcgccggcgcgcgccctcgcagtcaccgccacccaccagctccggcaccaacagcagcgccgctgccaccgcccaccttctgccgccgccaccacagccaccttctcctcctccgctgtcctctcccgtcctcgcctctgtcgactatcaggtgaactttgaaccaggatggctgagccccgccaggagttcgaagtgatggaagatcacgctgggacgtacgggttgggggacaggaaagatcaggggggctacaccatgcaccaagaccaagagggtgacacggacgctggcctgaaagaatctcccctgcagacccccactgaggacggatctgaggaaccgggctctgaaacctctgatgctaagagcactccaacagcggaagatgtgacagcacccttagtggatgagggagctcccggcaagcaggctgccgcgcagccccacacggagatcccagaaggaaccacagctgaagaagcaggcattggagacacccccagcctggaagacgaagctgctggtcacgtgacccaagagcctgaaagtggtaaggtggtccaggaaggcttcctccgagagccaggccccccaggtctgagccaccagctcatgtccggcatgcctggggctcccctcctgcctgagggccccagagaggccacacgccaaccttcggggacaggacctgaggacacagagggcggccgccacgcccctgagctgctcaagcaccagcttctaggagacctgcaccaggaggggccgccgctgaagggggcagggggcaaagagaggccggggagcaaggaggaggtggatgaagaccgcgacgtcgatgagtcctccccccaagactcccctccctccaaggcctccccagcccaagatgggcggcctccccagacagccgccagagaagccaccagcatcccaggcttcccagcggagggtgccatccccctccctgtggatttcctctccaaagtttccacagagatcccagcctcagagcccgacgggcccagtgtagggcgggccaaagggcaggatgcccccctggagttcacgtttcacgtggaaatcacacccaacgtgcagaaggagcaggcgcactcggaggagcatttgggaagggctgcatttccaggggcccctggagaggggccagaggcccggggcccctctttgggagaggacacaaaagaggctgaccttccagagccctctgaaaagcagcctgctgctgctccgcgggggaagcccgtcagccgggtccctcaactcaaagctcgcatggtcagtaaaagcaaagacgggactggaagcgatgacaaaaaagccaagacatccacacgttcctctgctaaaaccttgaaaaataggccttgccttagccccaaacaccccactcctggtagctcagaccctctgatccaaccctccagccctgctgtgtgcccagagccaccttcctctcctaaatacgtctcttctgtcacttcccgaactggcagttctggagcaaaggagatgaaactcaagggggctgatggtaaaacgaagatcgccacaccgcggggagcagcccctccaggccagaagggccaggccaacgccaccaggattccagcaaaaaccccgcccgctccaaagacaccacccagctctggtgaacctccaaaatcaggggatcgcagcggctacagcagccccggctccccaggcactcccggcagccgctcccgcaccccgtcccttccaaccccacccacccgggagcccaagaaggtggcagtggtccgtactccacccaagtcgccgtcttccgccaagagccgcctgcagacagcccccgtgcccatgccagacctgaagaatgtcaagtccaagatcggctccactgagaacctgaagcaccagccgggaggcgggaaggtgcagataattaataagaagctggatcttagcaacgtccagtccaagtgtggctcaaaggataatatcaaacacgtcccgggaggcggcagtgtgcaaatagtctacaaaccagttgacctgagcaaggtgacctccaagtgtggctcattaggcaacatccatcataaaccaggaggtggccaggtggaagtaaaatctgagaagcttgacttcaaggacagagtccagtcgaagattgggtccctggacaatatcacccacgtccctggcggaggaaataaaaagattgaaacccacaagctgaccttccgcgagaacgccaaagccaagacagaccacggggcggagatcgtgtacaagtcgccagtggtgtctggggacacgtctccacggcatctcagcaatgtctcctccaccggcagcatcgacatggtagactcgccccagctcgccacgctagctgacgaggtgtctgcctccctggccaagcagggtttgtgatcaggcccctggggcggtcaataattgtggagaggagagaatgagagagtgtggaaaaaaaaagaataatgacccggcccccgccctctgcccccagctgctcctcgcagttcggttaattggttaatcacttaacctgcttttgtcactcggctttggctcgggacttcaaaatcagtgatgggagtaagagcaaatttcatctttccaaattgatgggtgggctagtaataaaatatttaaaaaaaaacattcaaaaacatggccacatccaacatttcctcaggcaattccttttgattcttttttcttccccctccatgtagaagagggagaaggagaggctctgaaagctgcttctgggggatttcaagggactgggggtgccaaccacctctggccctgttgtgggggtgtcacagaggcagtggcagcaacaaaggatttgaaacttggtgtgttcgtggagccacaggcagacgatgtcaaccttgtgtgagtgtgacgggggttggggtggggcgggaggccacgggggaggccgaggcaggggctgggcagaggggagaggaagcacaagaagtgggagtgggagaggaagccacgtgctggagagtagacatccccctccttgccgctgggagagccaaggcctatgccacctgcagcgtctgagcggccgcctgtccttggtggccgggggtgggggcctgctgtgggtcagtgtgccaccctctgcagggcagcctgtgggagaagggacagcgggtaaaaagagaaggcaagctggcaggagggtggcacttcgtggatgacctccttagaaaagactgaccttgatgtcttgagagcgctggcctcttcctccctccctgcagggtagggggcctgagttgaggggcttccctctgctccacagaaaccctgttttattgagttctgaaggttggaactgctgccatgattttggccactttgcagacctgggactttagggctaaccagttctctttgtaaggacttgtgcctcttgggagacgtccacccgtttccaagcctgggccactggcatctctggagtgtgtgggggtctgggaggcaggtcccgagccccctgtccttcccacggccactgcagtcaccccgtctgcgccgctgtgctgttgtctgccgtgagagcccaatcactgcctatacccctcatcacacgtcacaatgtcccgaattcccagcctcaccaccccttctcagtaatgaccctggttggttgcaggaggtacctactccatactgagggtgaaattaagggaaggcaaagtccaggcacaagagtgggaccccagcctctcactctcagttccactcatccaactgggaccctcaccacgaatctcatgatctgattcggttccctgtctcctcctcccgtcacagatgtgagccagggcactgctcagctgtgaccctaggtgtttctgccttgttgacatggagagagccctttcccctgagaaggcctggccccttcctgtgctgagcccacagcagcaggctgggtgtcttggttgtcagtggtggcaccaggatggaagggcaaggcacccagggcaggcccacagtcccgctgtcccccacttgcaccctagcttgtagctgccaacctcccagacagcccagcccgctgctcagctccacatgcatagtatcagccctccacacccgacaaaggggaacacacccccttggaaatggttcttttcccccagtcccagctggaagccatgctgtctgttctgctggagcagctgaacatatacatagatgttgccctgccctccccatctgcaccctgttgagttgtagttggatttgtctgtttatgcttggattcaccagagtgactatgatagtgaaaagaaaaaaaaaaaaaaaaaaggacgcatgtatcttgaaatgcttgtaaagaggtttctaacccaccctcacgaggtgtctctcacccccacactgggactcgtgtggcctgtgtggtgccaccctgctggggcctcccaagttttgaaaggctttcctcagcacctgggacccaacagagaccagcttctagcagctaaggaggccgttcagctgtgacgaaggcctgaagcacaggattaggactgaagcgatgatgtccccttccctacttccccttggggctccctgtgtcagggcacagactaggtcttgtggctggtctggcttgcggcgcgaggatggttctctctggtcatagcccgaagtctcatggcagtcccaaaggaggcttacaactcctgcatcacaagaaaaaggaagccactgccagctggggggatctgcagctcccagaagctccgtgagcctcagccacccctcagactgggttcctctccaagctcgccctctggaggggcagcgcagcctcccaccaagggccctgcgaccacagcagggattgggatgaattgcctgtcctggatctgctctagaggcccaagctgcctgcctgaggaaggatgacttgacaagtcaggagacactgttcccaaagccttgaccagagcacctcagcccgctgaccttgcacaaactccatctgctgccatgagaaaagggaagccgcctttgcaaaacattgctgcctaaagaaactcagcagcctcaggcccaattctgccacttctggtttgggtacagttaaaggcaaccctgagggacttggcagtagaaatccagggcctcccctggggctggcagcttcgtgtgcagctagagctttacctgaaaggaagtctctgggcccagaactctccaccaagagcctccctgccgttcgctgagtcccagcaattctcctaagttgaagggatctgagaaggagaaggaaatgtggggtagatttggtggtggttagagatatgcccccctcattactgccaacagtttcggctgcatttcttcacgcacctcggttcctcttcctgaagttcttgtgccctgctcttcagcaccatgggccttcttatacggaaggctctgggatctcccccttgtggggcaggctcttggggccagcctaagatcatggtttagggtgatcagtgctggcagataaattgaaaaggcacgctggcttgtgatcttaaatgaggacaatccccccagggctgggcactcctcccctcccctcacttctcccacctgcagagccagtgtccttgggtgggctagataggatatactgtatgccggctccttcaagctgctgactcactttatcaatagttccatttaaattgacttcagtggtgagactgtatcctgtttgctattgcttgttgtgctatggggggaggggggaggaatgtgtaagatagttaacatgggcaaagggagatcttggggtgcagcacttaaactgcctcgtaacccttttcatgatttcaaccacatttgctagagggagggagcagccacggagttagaggcccttggggtttctcttttccactgacaggctttcccaggcagctggctagttcattccctccccagccaggtgcaggcgtaggaatatggacatctggttgctttggcctgctgccctctttcaggggtcctaagcccacaatcatgcctccctaagaccttggcatccttccctctaagccgttggcacctctgtgccacctctcacactggctccagacacacagcctgtgcttttggagctgagatcactcgcttcaccctcctcatctttgttctccaagtaaagccacgaggtcggggcgagggcagaggtgatcacctgcgtgtcccatctacagacctgcagcttcataaaacttctgatttctcttcagctttgaaaagggttaccctgggcactggcctagagcctcacctcctaatagacttagccccatgagtttgccatgttgagcaggactatttctggcacttgcaagtcccatgatttcttcggtaattctgagggtggggggagggacatgaaatcatcttagcttagctttctgtctgtgaatgtctatatagtgtattgtgtgttttaacaaatgatttacactgactgttgctgtaaaagtgaatttggaaataaagttattactctgattaaa

SEQ ID NO: 3945 - DNA, 5811 bp, Homo sapiens
  source 1..5811: mol_type = genomic DNA
ggacggccgagcggcagggcgctcgcgcgcgcccactagtggccggaggagaaggctcccgcggaggccgcgctgcccgccccctcccctggggaggctcgcgttcccgctgctcgcgcctgcgccgcccgccggcctcaggaacgcgccctcttcgccggcgcgcgccctcgcagtcaccgccacccaccagctccggcaccaacagcagcgccgctgccaccgcccaccttctgccgccgccaccacagccaccttctcctcctccgctgtcctctcccgtcctcgcctctgtcgactatcaggtgaactttgaaccaggatggctgagccccgccaggagttcgaagtgatggaagatcacgctgggacgtacgggttgggggacaggaaagatcaggggggctacaccatgcaccaagaccaagagggtgacacggacgctggcctgaaagaatctcccctgcagacccccactgaggacggatctgaggaaccgggctctgaaacctctgatgctaagagcactccaacagcggaagatgtgacagcacccttagtggatgagggagctcccggcaagcaggctgccgcgcagccccacacggagatcccagaaggaaccacagctgaagaagcaggcattggagacacccccagcctggaagacgaagctgctggtcacgtgacccaagctcgcatggtcagtaaaagcaaagacgggactggaagcgatgacaaaaaagccaagggggctgatggtaaaacgaagatcgccacaccgcggggagcagcccctccaggccagaagggccaggccaacgccaccaggattccagcaaaaaccccgcccgctccaaagacaccacccagctctggtgaacctccaaaatcaggggatcgcagcggctacagcagccccggctccccaggcactcccggcagccgctcccgcaccccgtcccttccaaccccacccacccgggagcccaagaaggtggcagtggtccgtactccacccaagtcgccgtcttccgccaagagccgcctgcagacagcccccgtgcccatgccagacctgaagaatgtcaagtccaagatcggctccactgagaacctgaagcaccagccgggaggcgggaaggtgcagataattaataagaagctggatcttagcaacgtccagtccaagtgtggctcaaaggataatatcaaacacgtcccgggaggcggcagtgtgcaaatagtctacaaaccagttgacctgagcaaggtgacctccaagtgtggctcattaggcaacatccatcataaaccaggaggtggccaggtggaagtaaaatctgagaagcttgacttcaaggacagagtccagtcgaagattgggtccctggacaatatcacccacgtccctggcggaggaaataaaaagattgaaacccacaagctgaccttccgcgagaacgccaaagccaagacagaccacggggcggagatcgtgtacaagtcgccagtggtgtctggggacacgtctccacggcatctcagcaatgtctcctccaccggcagcatcgacatggtagactcgccccagctcgccacgctagctgacgaggtgtctgcctccctggccaagcagggtttgtgatcaggcccctggggcggtcaataattgtggagaggagagaatgagagagtgtggaaaaaaaaagaataatgacccggcccccgccctctgcccccagctgctcctcgcagttcggttaattggttaatcacttaacctgcttttgtcactcggctttggctcgggacttcaaaatcagtgatgggagtaagagcaaatttcatctttccaaattgatgggtgggctagtaataaaatatttaaaaaaaaacattcaaaaacatggccacatccaacatttcctcaggcaattccttttgattcttttttcttccccctccatgtagaagagggagaaggagaggctctgaaagctgcttctgggggatttcaagggactgggggtgccaaccacctctggccctgttgtgggggtgtcacagaggcagtggcagcaacaaaggatttgaaacttggtgtgttcgtggagccacaggcagacgatgtcaaccttgtgtgagtgtgacgggggttggggtggggcgggaggccacgggggaggccgaggcaggggctgggcagaggggagaggaagcacaagaagtgggagtgggagaggaagccacgtgctggagagtagacatccccctccttgccgctgggagagccaaggcctatgccacctgcagcgtctgagcggccgcctgtccttggtggccgggggtgggggcctgctgtgggtcagtgtgccaccctctgcagggcagcctgtgggagaagggacagcgggtaaaaagagaaggcaagctggcaggagggtggcacttcgtggatgacctccttagaaaagactgaccttgatgtcttgagagcgctggcctcttcctccctccctgcagggtagggggcctgagttgaggggcttccctctgctccacagaaaccctgttttattgagttctgaaggttggaactgctgccatgattttggccactttgcagacctgggactttagggctaaccagttctctttgtaaggacttgtgcctcttgggagacgtccacccgtttccaagcctgggccactggcatctctggagtgtgtgggggtctgggaggcaggtcccgagccccctgtccttcccacggccactgcagtcaccccgtctgcgccgctgtgctgttgtctgccgtgagagcccaatcactgcctatacccctcatcacacgtcacaatgtcccgaattcccagcctcaccaccccttctcagtaatgaccctggttggttgcaggaggtacctactccatactgagggtgaaattaagggaaggcaaagtccaggcacaagagtgggaccccagcctctcactctcagttccactcatccaactgggaccctcaccacgaatctcatgatctgattcggttccctgtctcctcctcccgtcacagatgtgagccagggcactgctcagctgtgaccctaggtgtttctgccttgttgacatggagagagccctttcccctgagaaggcctggccccttcctgtgctgagcccacagcagcaggctgggtgtcttggttgtcagtggtggcaccaggatggaagggcaaggcacccagggcaggcccacagtcccgctgtcccccacttgcaccctagcttgtagctgccaacctcccagacagcccagcccgctgctcagctccacatgcatagtatcagccctccacacccgacaaaggggaacacacccccttggaaatggttcttttcccccagtcccagctggaagccatgctgtctgttctgctggagcagctgaacatatacatagatgttgccctgccctccccatctgcaccctgttgagttgtagttggatttgtctgtttatgcttggattcaccagagtgactatgatagtgaaaagaaaaaaaaaaaaaaaaaaggacgcatgtatcttgaaatgcttgtaaagaggtttctaacccaccctcacgaggtgtctctcacccccacactgggactcgtgtggcctgtgtggtgccaccctgctggggcctcccaagttttgaaaggctttcctcagcacctgggacccaacagagaccagcttctagcagctaaggaggccgttcagctgtgacgaaggcctgaagcacaggattaggactgaagcgatgatgtccccttccctacttccccttggggctccctgtgtcagggcacagactaggtcttgtggctggtctggcttgcggcgcgaggatggttctctctggtcatagcccgaagtctcatggcagtcccaaaggaggcttacaactcctgcatcacaagaaaaaggaagccactgccagctggggggatctgcagctcccagaagctccgtgagcctcagccacccctcagactgggttcctctccaagctcgccctctggaggggcagcgcagcctcccaccaagggccctgcgaccacagcagggattgggatgaattgcctgtcctggatctgctctagaggcccaagctgcctgcctgaggaaggatgacttgacaagtcaggagacactgttcccaaagccttgaccagagcacctcagcccgctgaccttgcacaaactccatctgctgccatgagaaaagggaagccgcctttgcaaaacattgctgcctaaagaaactcagcagcctcaggcccaattctgccacttctggtttgggtacagttaaaggcaaccctgagggacttggcagtagaaatccagggcctcccctggggctggcagcttcgtgtgcagctagagctttacctgaaaggaagtctctgggcccagaactctccaccaagagcctccctgccgttcgctgagtcccagcaattctcctaagttgaagggatctgagaaggagaaggaaatgtggggtagatttggtggtggttagagatatgcccccctcattactgccaacagtttcggctgcatttcttcacgcacctcggttcctcttcctgaagttcttgtgccctgctcttcagcaccatgggccttcttatacggaaggctctgggatctcccccttgtggggcaggctcttggggccagcctaagatcatggtttagggtgatcagtgctggcagataaattgaaaaggcacgctggcttgtgatcttaaatgaggacaatccccccagggctgggcactcctcccctcccctcacttctcccacctgcagagccagtgtccttgggtgggctagataggatatactgtatgccggctccttcaagctgctgactcactttatcaatagttccatttaaattgacttcagtggtgagactgtatcctgtttgctattgcttgttgtgctatggggggaggggggaggaatgtgtaagatagttaacatgggcaaagggagatcttggggtgcagcacttaaactgcctcgtaacccttttcatgatttcaaccacatttgctagagggagggagcagccacggagttagaggcccttggggtttctcttttccactgacaggctttcccaggcagctggctagttcattccctccccagccaggtgcaggcgtaggaatatggacatctggttgctttggcctgctgccctctttcaggggtcctaagcccacaatcatgcctccctaagaccttggcatccttccctctaagccgttggcacctctgtgccacctctcacactggctccagacacacagcctgtgcttttggagctgagatcactcgcttcaccctcctcatctttgttctccaagtaaagccacgaggtcggggcgagggcagaggtgatcacctgcgtgtcccatctacagacctgcagcttcataaaacttctgatttctcttcagctttgaaaagggttaccctgggcactggcctagagcctcacctcctaatagacttagccccatgagtttgccatgttgagcaggactatttctggcacttgcaagtcccatgatttcttcggtaattctgagggtggggggagggacatgaaatcatcttagcttagctttctgtctgtgaatgtctatatagtgtattgtgtgttttaacaaatgatttacactgactgttgctgtaaaagtgaatttggaaataaagttattactctgattaaa

SEQ ID NO: 3946 - DNA, 5637 bp, Homo sapiens
  source 1..5637: mol_type = genomic DNA
ggacggccgagcggcagggcgctcgcgcgcgcccactagtggccggaggagaaggctcccgcggaggccgcgctgcccgccccctcccctggggaggctcgcgttcccgctgctcgcgcctgcgccgcccgccggcctcaggaacgcgccctcttcgccggcgcgcgccctcgcagtcaccgccacccaccagctccggcaccaacagcagcgccgctgccaccgcccaccttctgccgccgccaccacagccaccttctcctcctccgctgtcctctcccgtcctcgcctctgtcgactatcaggtgaactttgaaccaggatggctgagccccgccaggagttcgaagtgatggaagatcacgctgggacgtacgggttgggggacaggaaagatcaggggggctacaccatgcaccaagaccaagagggtgacacggacgctggcctgaaagctgaagaagcaggcattggagacacccccagcctggaagacgaagctgctggtcacgtgacccaagctcgcatggtcagtaaaagcaaagacgggactggaagcgatgacaaaaaagccaagggggctgatggtaaaacgaagatcgccacaccgcggggagcagcccctccaggccagaagggccaggccaacgccaccaggattccagcaaaaaccccgcccgctccaaagacaccacccagctctggtgaacctccaaaatcaggggatcgcagcggctacagcagccccggctccccaggcactcccggcagccgctcccgcaccccgtcccttccaaccccacccacccgggagcccaagaaggtggcagtggtccgtactccacccaagtcgccgtcttccgccaagagccgcctgcagacagcccccgtgcccatgccagacctgaagaatgtcaagtccaagatcggctccactgagaacctgaagcaccagccgggaggcgggaaggtgcagataattaataagaagctggatcttagcaacgtccagtccaagtgtggctcaaaggataatatcaaacacgtcccgggaggcggcagtgtgcaaatagtctacaaaccagttgacctgagcaaggtgacctccaagtgtggctcattaggcaacatccatcataaaccaggaggtggccaggtggaagtaaaatctgagaagcttgacttcaaggacagagtccagtcgaagattgggtccctggacaatatcacccacgtccctggcggaggaaataaaaagattgaaacccacaagctgaccttccgcgagaacgccaaagccaagacagaccacggggcggagatcgtgtacaagtcgccagtggtgtctggggacacgtctccacggcatctcagcaatgtctcctccaccggcagcatcgacatggtagactcgccccagctcgccacgctagctgacgaggtgtctgcctccctggccaagcagggtttgtgatcaggcccctggggcggtcaataattgtggagaggagagaatgagagagtgtggaaaaaaaaagaataatgacccggcccccgccctctgcccccagctgctcctcgcagttcggttaattggttaatcacttaacctgcttttgtcactcggctttggctcgggacttcaaaatcagtgatgggagtaagagcaaatttcatctttccaaattgatgggtgggctagtaataaaatatttaaaaaaaaacattcaaaaacatggccacatccaacatttcctcaggcaattccttttgattcttttttcttccccctccatgtagaagagggagaaggagaggctctgaaagctgcttctgggggatttcaagggactgggggtgccaaccacctctggccctgttgtgggggtgtcacagaggcagtggcagcaacaaaggatttgaaacttggtgtgttcgtggagccacaggcagacgatgtcaaccttgtgtgagtgtgacgggggttggggtggggcgggaggccacgggggaggccgaggcaggggctgggcagaggggagaggaagcacaagaagtgggagtgggagaggaagccacgtgctggagagtagacatccccctccttgccgctgggagagccaaggcctatgccacctgcagcgtctgagcggccgcctgtccttggtggccgggggtgggggcctgctgtgggtcagtgtgccaccctctgcagggcagcctgtgggagaagggacagcgggtaaaaagagaaggcaagctggcaggagggtggcacttcgtggatgacctccttagaaaagactgaccttgatgtcttgagagcgctggcctcttcctccctccctgcagggtagggggcctgagttgaggggcttccctctgctccacagaaaccctgttttattgagttctgaaggttggaactgctgccatgattttggccactttgcagacctgggactttagggctaaccagttctctttgtaaggacttgtgcctcttgggagacgtccacccgtttccaagcctgggccactggcatctctggagtgtgtgggggtctgggaggcaggtcccgagccccctgtccttcccacggccactgcagtcaccccgtctgcgccgctgtgctgttgtctgccgtgagagcccaatcactgcctatacccctcatcacacgtcacaatgtcccgaattcccagcctcaccaccccttctcagtaatgaccctggttggttgcaggaggtacctactccatactgagggtgaaattaagggaaggcaaagtccaggcacaagagtgggaccccagcctctcactctcagttccactcatccaactgggaccctcaccacgaatctcatgatctgattcggttccctgtctcctcctcccgtcacagatgtgagccagggcactgctcagctgtgaccctaggtgtttctgccttgttgacatggagagagccctttcccctgagaaggcctggccccttcctgtgctgagcccacagcagcaggctgggtgtcttggttgtcagtggtggcaccaggatggaagggcaaggcacccagggcaggcccacagtcccgctgtcccccacttgcaccctagcttgtagctgccaacctcccagacagcccagcccgctgctcagctccacatgcatagtatcagccctccacacccgacaaaggggaacacacccccttggaaatggttcttttcccccagtcccagctggaagccatgctgtctgttctgctggagcagctgaacatatacatagatgttgccctgccctccccatctgcaccctgttgagttgtagttggatttgtctgtttatgcttggattcaccagagtgactatgatagtgaaaagaaaaaaaaaaaaaaaaaaggacgcatgtatcttgaaatgcttgtaaagaggtttctaacccaccctcacgaggtgtctctcacccccacactgggactcgtgtggcctgtgtggtgccaccctgctggggcctcccaagttttgaaaggctttcctcagcacctgggacccaacagagaccagcttctagcagctaaggaggccgttcagctgtgacgaaggcctgaagcacaggattaggactgaagcgatgatgtccccttccctacttccccttggggctccctgtgtcagggcacagactaggtcttgtggctggtctggcttgcggcgcgaggatggttctctctggtcatagcccgaagtctcatggcagtcccaaaggaggcttacaactcctgcatcacaagaaaaaggaagccactgccagctggggggatctgcagctcccagaagctccgtgagcctcagccacccctcagactgggttcctctccaagctcgccctctggaggggcagcgcagcctcccaccaagggccctgcgaccacagcagggattgggatgaattgcctgtcctggatctgctctagaggcccaagctgcctgcctgaggaaggatgacttgacaagtcaggagacactgttcccaaagccttgaccagagcacctcagcccgctgaccttgcacaaactccatctgctgccatgagaaaagggaagccgcctttgcaaaacattgctgcctaaagaaactcagcagcctcaggcccaattctgccacttctggtttgggtacagttaaaggcaaccctgagggacttggcagtagaaatccagggcctcccctggggctggcagcttcgtgtgcagctagagctttacctgaaaggaagtctctgggcccagaactctccaccaagagcctccctgccgttcgctgagtcccagcaattctcctaagttgaagggatctgagaaggagaaggaaatgtggggtagatttggtggtggttagagatatgcccccctcattactgccaacagtttcggctgcatttcttcacgcacctcggttcctcttcctgaagttcttgtgccctgctcttcagcaccatgggccttcttatacggaaggctctgggatctcccccttgtggggcaggctcttggggccagcctaagatcatggtttagggtgatcagtgctggcagataaattgaaaaggcacgctggcttgtgatcttaaatgaggacaatccccccagggctgggcactcctcccctcccctcacttctcccacctgcagagccagtgtccttgggtgggctagataggatatactgtatgccggctccttcaagctgctgactcactttatcaatagttccatttaaattgacttcagtggtgagactgtatcctgtttgctattgcttgttgtgctatggggggaggggggaggaatgtgtaagatagttaacatgggcaaagggagatcttggggtgcagcacttaaactgcctcgtaacccttttcatgatttcaaccacatttgctagagggagggagcagccacggagttagaggcccttggggtttctcttttccactgacaggctttcccaggcagctggctagttcattccctccccagccaggtgcaggcgtaggaatatggacatctggttgctttggcctgctgccctctttcaggggtcctaagcccacaatcatgcctccctaagaccttggcatccttccctctaagccgttggcacctctgtgccacctctcacactggctccagacacacagcctgtgcttttggagctgagatcactcgcttcaccctcctcatctttgttctccaagtaaagccacgaggtcggggcgagggcagaggtgatcacctgcgtgtcccatctacagacctgcagcttcataaaacttctgatttctcttcagctttgaaaagggttaccctgggcactggcctagagcctcacctcctaatagacttagccccatgagtttgccatgttgagcaggactatttctggcacttgcaagtcccatgatttcttcggtaattctgagggtggggggagggacatgaaatcatcttagcttagctttctgtctgtgaatgtctatatagtgtattgtgtgttttaacaaatgatttacactgactgttgctgtaaaagtgaatttggaaataaagttattactctgattaaa

SEQ ID NO: 3947 - DNA, 5544 bp, Homo sapiens
  source 1..5544: mol_type = genomic DNA
ggacggccgagcggcagggcgctcgcgcgcgcccactagtggccggaggagaaggctcccgcggaggccgcgctgcccgccccctcccctggggaggctcgcgttcccgctgctcgcgcctgcgccgcccgccggcctcaggaacgcgccctcttcgccggcgcgcgccctcgcagtcaccgccacccaccagctccggcaccaacagcagcgccgctgccaccgcccaccttctgccgccgccaccacagccaccttctcctcctccgctgtcctctcccgtcctcgcctctgtcgactatcaggtgaactttgaaccaggatggctgagccccgccaggagttcgaagtgatggaagatcacgctgggacgtacgggttgggggacaggaaagatcaggggggctacaccatgcaccaagaccaagagggtgacacggacgctggcctgaaagctgaagaagcaggcattggagacacccccagcctggaagacgaagctgctggtcacgtgacccaagctcgcatggtcagtaaaagcaaagacgggactggaagcgatgacaaaaaagccaagggggctgatggtaaaacgaagatcgccacaccgcggggagcagcccctccaggccagaagggccaggccaacgccaccaggattccagcaaaaaccccgcccgctccaaagacaccacccagctctggtgaacctccaaaatcaggggatcgcagcggctacagcagccccggctccccaggcactcccggcagccgctcccgcaccccgtcccttccaaccccacccacccgggagcccaagaaggtggcagtggtccgtactccacccaagtcgccgtcttccgccaagagccgcctgcagacagcccccgtgcccatgccagacctgaagaatgtcaagtccaagatcggctccactgagaacctgaagcaccagccgggaggcgggaaggtgcaaatagtctacaaaccagttgacctgagcaaggtgacctccaagtgtggctcattaggcaacatccatcataaaccaggaggtggccaggtggaagtaaaatctgagaagcttgacttcaaggacagagtccagtcgaagattgggtccctggacaatatcacccacgtccctggcggaggaaataaaaagattgaaacccacaagctgaccttccgcgagaacgccaaagccaagacagaccacggggcggagatcgtgtacaagtcgccagtggtgtctggggacacgtctccacggcatctcagcaatgtctcctccaccggcagcatcgacatggtagactcgccccagctcgccacgctagctgacgaggtgtctgcctccctggccaagcagggtttgtgatcaggcccctggggcggtcaataattgtggagaggagagaatgagagagtgtggaaaaaaaaagaataatgacccggcccccgccctctgcccccagctgctcctcgcagttcggttaattggttaatcacttaacctgcttttgtcactcggctttggctcgggacttcaaaatcagtgatgggagtaagagcaaatttcatctttccaaattgatgggtgggctagtaataaaatatttaaaaaaaaacattcaaaaacatggccacatccaacatttcctcaggcaattccttttgattcttttttcttccccctccatgtagaagagggagaaggagaggctctgaaagctgcttctgggggatttcaagggactgggggtgccaaccacctctggccctgttgtgggggtgtcacagaggcagtggcagcaacaaaggatttgaaacttggtgtgttcgtggagccacaggcagacgatgtcaaccttgtgtgagtgtgacgggggttggggtggggcgggaggccacgggggaggccgaggcaggggctgggcagaggggagaggaagcacaagaagtgggagtgggagaggaagccacgtgctggagagtagacatccccctccttgccgctgggagagccaaggcctatgccacctgcagcgtctgagcggccgcctgtccttggtggccgggggtgggggcctgctgtgggtcagtgtgccaccctctgcagggcagcctgtgggagaagggacagcgggtaaaaagagaaggcaagctggcaggagggtggcacttcgtggatgacctccttagaaaagactgaccttgatgtcttgagagcgctggcctcttcctccctccctgcagggtagggggcctgagttgaggggcttccctctgctccacagaaaccctgttttattgagttctgaaggttggaactgctgccatgattttggccactttgcagacctgggactttagggctaaccagttctctttgtaaggacttgtgcctcttgggagacgtccacccgtttccaagcctgggccactggcatctctggagtgtgtgggggtctgggaggcaggtcccgagccccctgtccttcccacggccactgcagtcaccccgtctgcgccgctgtgctgttgtctgccgtgagagcccaatcactgcctatacccctcatcacacgtcacaatgtcccgaattcccagcctcaccaccccttctcagtaatgaccctggttggttgcaggaggtacctactccatactgagggtgaaattaagggaaggcaaagtccaggcacaagagtgggaccccagcctctcactctcagttccactcatccaactgggaccctcaccacgaatctcatgatctgattcggttccctgtctcctcctcccgtcacagatgtgagccagggcactgctcagctgtgaccctaggtgtttctgccttgttgacatggagagagccctttcccctgagaaggcctggccccttcctgtgctgagcccacagcagcaggctgggtgtcttggttgtcagtggtggcaccaggatggaagggcaaggcacccagggcaggcccacagtcccgctgtcccccacttgcaccctagcttgtagctgccaacctcccagacagcccagcccgctgctcagctccacatgcatagtatcagccctccacacccgacaaaggggaacacacccccttggaaatggttcttttcccccagtcccagctggaagccatgctgtctgttctgctggagcagctgaacatatacatagatgttgccctgccctccccatctgcaccctgttgagttgtagttggatttgtctgtttatgcttggattcaccagagtgactatgatagtgaaaagaaaaaaaaaaaaaaaaaaggacgcatgtatcttgaaatgcttgtaaagaggtttctaacccaccctcacgaggtgtctctcacccccacactgggactcgtgtggcctgtgtggtgccaccctgctggggcctcccaagttttgaaaggctttcctcagcacctgggacccaacagagaccagcttctagcagctaaggaggccgttcagctgtgacgaaggcctgaagcacaggattaggactgaagcgatgatgtccccttccctacttccccttggggctccctgtgtcagggcacagactaggtcttgtggctggtctggcttgcggcgcgaggatggttctctctggtcatagcccgaagtctcatggcagtcccaaaggaggcttacaactcctgcatcacaagaaaaaggaagccactgccagctggggggatctgcagctcccagaagctccgtgagcctcagccacccctcagactgggttcctctccaagctcgccctctggaggggcagcgcagcctcccaccaagggccctgcgaccacagcagggattgggatgaattgcctgtcctggatctgctctagaggcccaagctgcctgcctgaggaaggatgacttgacaagtcaggagacactgttcccaaagccttgaccagagcacctcagcccgctgaccttgcacaaactccatctgctgccatgagaaaagggaagccgcctttgcaaaacattgctgcctaaagaaactcagcagcctcaggcccaattctgccacttctggtttgggtacagttaaaggcaaccctgagggacttggcagtagaaatccagggcctcccctggggctggcagcttcgtgtgcagctagagctttacctgaaaggaagtctctgggcccagaactctccaccaagagcctccctgccgttcgctgagtcccagcaattctcctaagttgaagggatctgagaaggagaaggaaatgtggggtagatttggtggtggttagagatatgcccccctcattactgccaacagtttcggctgcatttcttcacgcacctcggttcctcttcctgaagttcttgtgccctgctcttcagcaccatgggccttcttatacggaaggctctgggatctcccccttgtggggcaggctcttggggccagcctaagatcatggtttagggtgatcagtgctggcagataaattgaaaaggcacgctggcttgtgatcttaaatgaggacaatccccccagggctgggcactcctcccctcccctcacttctcccacctgcagagccagtgtccttgggtgggctagataggatatactgtatgccggctccttcaagctgctgactcactttatcaatagttccatttaaattgacttcagtggtgagactgtatcctgtttgctattgcttgttgtgctatggggggaggggggaggaatgtgtaagatagttaacatgggcaaagggagatcttggggtgcagcacttaaactgcctcgtaacccttttcatgatttcaaccacatttgctagagggagggagcagccacggagttagaggcccttggggtttctcttttccactgacaggctttcccaggcagctggctagttcattccctccccagccaggtgcaggcgtaggaatatggacatctggttgctttggcctgctgccctctttcaggggtcctaagcccacaatcatgcctccctaagaccttggcatccttccctctaagccgttggcacctctgtgccacctctcacactggctccagacacacagcctgtgcttttggagctgagatcactcgcttcaccctcctcatctttgttctccaagtaaagccacgaggtcggggcgagggcagaggtgatcacctgcgtgtcccatctacagacctgcagcttcataaaacttctgatttctcttcagctttgaaaagggttaccctgggcactggcctagagcctcacctcctaatagacttagccccatgagtttgccatgttgagcaggactatttctggcacttgcaagtcccatgatttcttcggtaattctgagggtggggggagggacatgaaatcatcttagcttagctttctgtctgtgaatgtctatatagtgtattgtgtgttttaacaaatgatttacactgactgttgctgtaaaagtgaatttggaaataaagttattactctgattaaa

SEQ ID NO: 3948 - DNA, 5724 bp, Homo sapiens
  source 1..5724: mol_type = genomic DNA
ggacggccgagcggcagggcgctcgcgcgcgcccactagtggccggaggagaaggctcccgcggaggccgcgctgcccgccccctcccctggggaggctcgcgttcccgctgctcgcgcctgcgccgcccgccggcctcaggaacgcgccctcttcgccggcgcgcgccctcgcagtcaccgccacccaccagctccggcaccaacagcagcgccgctgccaccgcccaccttctgccgccgccaccacagccaccttctcctcctccgctgtcctctcccgtcctcgcctctgtcgactatcaggtgaactttgaaccaggatggctgagccccgccaggagttcgaagtgatggaagatcacgctgggacgtacgggttgggggacaggaaagatcaggggggctacaccatgcaccaagaccaagagggtgacacggacgctggcctgaaagaatctcccctgcagacccccactgaggacggatctgaggaaccgggctctgaaacctctgatgctaagagcactccaacagcggaagctgaagaagcaggcattggagacacccccagcctggaagacgaagctgctggtcacgtgacccaagctcgcatggtcagtaaaagcaaagacgggactggaagcgatgacaaaaaagccaagggggctgatggtaaaacgaagatcgccacaccgcggggagcagcccctccaggccagaagggccaggccaacgccaccaggattccagcaaaaaccccgcccgctccaaagacaccacccagctctggtgaacctccaaaatcaggggatcgcagcggctacagcagccccggctccccaggcactcccggcagccgctcccgcaccccgtcccttccaaccccacccacccgggagcccaagaaggtggcagtggtccgtactccacccaagtcgccgtcttccgccaagagccgcctgcagacagcccccgtgcccatgccagacctgaagaatgtcaagtccaagatcggctccactgagaacctgaagcaccagccgggaggcgggaaggtgcagataattaataagaagctggatcttagcaacgtccagtccaagtgtggctcaaaggataatatcaaacacgtcccgggaggcggcagtgtgcaaatagtctacaaaccagttgacctgagcaaggtgacctccaagtgtggctcattaggcaacatccatcataaaccaggaggtggccaggtggaagtaaaatctgagaagcttgacttcaaggacagagtccagtcgaagattgggtccctggacaatatcacccacgtccctggcggaggaaataaaaagattgaaacccacaagctgaccttccgcgagaacgccaaagccaagacagaccacggggcggagatcgtgtacaagtcgccagtggtgtctggggacacgtctccacggcatctcagcaatgtctcctccaccggcagcatcgacatggtagactcgccccagctcgccacgctagctgacgaggtgtctgcctccctggccaagcagggtttgtgatcaggcccctggggcggtcaataattgtggagaggagagaatgagagagtgtggaaaaaaaaagaataatgacccggcccccgccctctgcccccagctgctcctcgcagttcggttaattggttaatcacttaacctgcttttgtcactcggctttggctcgggacttcaaaatcagtgatgggagtaagagcaaatttcatctttccaaattgatgggtgggctagtaataaaatatttaaaaaaaaacattcaaaaacatggccacatccaacatttcctcaggcaattccttttgattcttttttcttccccctccatgtagaagagggagaaggagaggctctgaaagctgcttctgggggatttcaagggactgggggtgccaaccacctctggccctgttgtgggggtgtcacagaggcagtggcagcaacaaaggatttgaaacttggtgtgttcgtggagccacaggcagacgatgtcaaccttgtgtgagtgtgacgggggttggggtggggcgggaggccacgggggaggccgaggcaggggctgggcagaggggagaggaagcacaagaagtgggagtgggagaggaagccacgtgctggagagtagacatccccctccttgccgctgggagagccaaggcctatgccacctgcagcgtctgagcggccgcctgtccttggtggccgggggtgggggcctgctgtgggtcagtgtgccaccctctgcagggcagcctgtgggagaagggacagcgggtaaaaagagaaggcaagctggcaggagggtggcacttcgtggatgacctccttagaaaagactgaccttgatgtcttgagagcgctggcctcttcctccctccctgcagggtagggggcctgagttgaggggcttccctctgctccacagaaaccctgttttattgagttctgaaggttggaactgctgccatgattttggccactttgcagacctgggactttagggctaaccagttctctttgtaaggacttgtgcctcttgggagacgtccacccgtttccaagcctgggccactggcatctctggagtgtgtgggggtctgggaggcaggtcccgagccccctgtccttcccacggccactgcagtcaccccgtctgcgccgctgtgctgttgtctgccgtgagagcccaatcactgcctatacccctcatcacacgtcacaatgtcccgaattcccagcctcaccaccccttctcagtaatgaccctggttggttgcaggaggtacctactccatactgagggtgaaattaagggaaggcaaagtccaggcacaagagtgggaccccagcctctcactctcagttccactcatccaactgggaccctcaccacgaatctcatgatctgattcggttccctgtctcctcctcccgtcacagatgtgagccagggcactgctcagctgtgaccctaggtgtttctgccttgttgacatggagagagccctttcccctgagaaggcctggccccttcctgtgctgagcccacagcagcaggctgggtgtcttggttgtcagtggtggcaccaggatggaagggcaaggcacccagggcaggcccacagtcccgctgtcccccacttgcaccctagcttgtagctgccaacctcccagacagcccagcccgctgctcagctccacatgcatagtatcagccctccacacccgacaaaggggaacacacccccttggaaatggttcttttcccccagtcccagctggaagccatgctgtctgttctgctggagcagctgaacatatacatagatgttgccctgccctccccatctgcaccctgttgagttgtagttggatttgtctgtttatgcttggattcaccagagtgactatgatagtgaaaagaaaaaaaaaaaaaaaaaaggacgcatgtatcttgaaatgcttgtaaagaggtttctaacccaccctcacgaggtgtctctcacccccacactgggactcgtgtggcctgtgtggtgccaccctgctggggcctcccaagttttgaaaggctttcctcagcacctgggacccaacagagaccagcttctagcagctaaggaggccgttcagctgtgacgaaggcctgaagcacaggattaggactgaagcgatgatgtccccttccctacttccccttggggctccctgtgtcagggcacagactaggtcttgtggctggtctggcttgcggcgcgaggatggttctctctggtcatagcccgaagtctcatggcagtcccaaaggaggcttacaactcctgcatcacaagaaaaaggaagccactgccagctggggggatctgcagctcccagaagctccgtgagcctcagccacccctcagactgggttcctctccaagctcgccctctggaggggcagcgcagcctcccaccaagggccctgcgaccacagcagggattgggatgaattgcctgtcctggatctgctctagaggcccaagctgcctgcctgaggaaggatgacttgacaagtcaggagacactgttcccaaagccttgaccagagcacctcagcccgctgaccttgcacaaactccatctgctgccatgagaaaagggaagccgcctttgcaaaacattgctgcctaaagaaactcagcagcctcaggcccaattctgccacttctggtttgggtacagttaaaggcaaccctgagggacttggcagtagaaatccagggcctcccctggggctggcagcttcgtgtgcagctagagctttacctgaaaggaagtctctgggcccagaactctccaccaagagcctccctgccgttcgctgagtcccagcaattctcctaagttgaagggatctgagaaggagaaggaaatgtggggtagatttggtggtggttagagatatgcccccctcattactgccaacagtttcggctgcatttcttcacgcacctcggttcctcttcctgaagttcttgtgccctgctcttcagcaccatgggccttcttatacggaaggctctgggatctcccccttgtggggcaggctcttggggccagcctaagatcatggtttagggtgatcagtgctggcagataaattgaaaaggcacgctggcttgtgatcttaaatgaggacaatccccccagggctgggcactcctcccctcccctcacttctcccacctgcagagccagtgtccttgggtgggctagataggatatactgtatgccggctccttcaagctgctgactcactttatcaatagttccatttaaattgacttcagtggtgagactgtatcctgtttgctattgcttgttgtgctatggggggaggggggaggaatgtgtaagatagttaacatgggcaaagggagatcttggggtgcagcacttaaactgcctcgtaacccttttcatgatttcaaccacatttgctagagggagggagcagccacggagttagaggcccttggggtttctcttttccactgacaggctttcccaggcagctggctagttcattccctccccagccaggtgcaggcgtaggaatatggacatctggttgctttggcctgctgccctctttcaggggtcctaagcccacaatcatgcctccctaagaccttggcatccttccctctaagccgttggcacctctgtgccacctctcacactggctccagacacacagcctgtgcttttggagctgagatcactcgcttcaccctcctcatctttgttctccaagtaaagccacgaggtcggggcgagggcagaggtgatcacctgcgtgtcccatctacagacctgcagcttcataaaacttctgatttctcttcagctttgaaaagggttaccctgggcactggcctagagcctcacctcctaatagacttagccccatgagtttgccatgttgagcaggactatttctggcacttgcaagtcccatgatttcttcggtaattctgagggtggggggagggacatgaaatcatcttagcttagctttctgtctgtgaatgtctatatagtgtattgtgtgttttaacaaatgatttacactgactgttgctgtaaaagtgaatttggaaataaagttattactctgattaaa

SEQ ID NO: 3949 - DNA, 6816 bp, Homo sapiens
  source 1..6816: mol_type = genomic DNA
ggacggccgagcggcagggcgctcgcgcgcgcccactagtggccggaggagaaggctcccgcggaggccgcgctgcccgccccctcccctggggaggctcgcgttcccgctgctcgcgcctgcgccgcccgccggcctcaggaacgcgccctcttcgccggcgcgcgccctcgcagtcaccgccacccaccagctccggcaccaacagcagcgccgctgccaccgcccaccttctgccgccgccaccacagccaccttctcctcctccgctgtcctctcccgtcctcgcctctgtcgactatcaggtgaactttgaaccaggatggctgagccccgccaggagttcgaagtgatggaagatcacgctgggacgtacgggttgggggacaggaaagatcaggggggctacaccatgcaccaagaccaagagggtgacacggacgctggcctgaaagaatctcccctgcagacccccactgaggacggatctgaggaaccgggctctgaaacctctgatgctaagagcactccaacagcggaagatgtgacagcacccttagtggatgagggagctcccggcaagcaggctgccgcgcagccccacacggagatcccagaaggaaccacagctgaagaagcaggcattggagacacccccagcctggaagacgaagctgctggtcacgtgacccaagagcctgaaagtggtaaggtggtccaggaaggcttcctccgagagccaggccccccaggtctgagccaccagctcatgtccggcatgcctggggctcccctcctgcctgagggccccagagaggccacacgccaaccttcggggacaggacctgaggacacagagggcggccgccacgcccctgagctgctcaagcaccagcttctaggagacctgcaccaggaggggccgccgctgaagggggcagggggcaaagagaggccggggagcaaggaggaggtggatgaagaccgcgacgtcgatgagtcctccccccaagactcccctccctccaaggcctccccagcccaagatgggcggcctccccagacagccgccagagaagccaccagcatcccaggcttcccagcggagggtgccatccccctccctgtggatttcctctccaaagtttccacagagatcccagcctcagagcccgacgggcccagtgtagggcgggccaaagggcaggatgcccccctggagttcacgtttcacgtggaaatcacacccaacgtgcagaaggagcaggcgcactcggaggagcatttgggaagggctgcatttccaggggcccctggagaggggccagaggcccggggcccctctttgggagaggacacaaaagaggctgaccttccagagccctctgaaaagcagcctgctgctgctccgcgggggaagcccgtcagccgggtccctcaactcaaagctcgcatggtcagtaaaagcaaagacgggactggaagcgatgacaaaaaagccaagacatccacacgttcctctgctaaaaccttgaaaaataggccttgccttagccccaaacaccccactcctggtagctcagaccctctgatccaaccctccagccctgctgtgtgcccagagccaccttcctctcctaaatacgtctcttctgtcacttcccgaactggcagttctggagcaaaggagatgaaactcaagggggctgatggtaaaacgaagatcgccacaccgcggggagcagcccctccaggccagaagggccaggccaacgccaccaggattccagcaaaaaccccgcccgctccaaagacaccacccagctctgcgactaagcaagtccagagaagaccaccccctgcagggcccagatctgagagaggtgaacctccaaaatcaggggatcgcagcggctacagcagccccggctccccaggcactcccggcagccgctcccgcaccccgtcccttccaaccccacccacccgggagcccaagaaggtggcagtggtccgtactccacccaagtcgccgtcttccgccaagagccgcctgcagacagcccccgtgcccatgccagacctgaagaatgtcaagtccaagatcggctccactgagaacctgaagcaccagccgggaggcgggaaggtgcagataattaataagaagctggatcttagcaacgtccagtccaagtgtggctcaaaggataatatcaaacacgtcccgggaggcggcagtgtgcaaatagtctacaaaccagttgacctgagcaaggtgacctccaagtgtggctcattaggcaacatccatcataaaccaggaggtggccaggtggaagtaaaatctgagaagcttgacttcaaggacagagtccagtcgaagattgggtccctggacaatatcacccacgtccctggcggaggaaataaaaagattgaaacccacaagctgaccttccgcgagaacgccaaagccaagacagaccacggggcggagatcgtgtacaagtcgccagtggtgtctggggacacgtctccacggcatctcagcaatgtctcctccaccggcagcatcgacatggtagactcgccccagctcgccacgctagctgacgaggtgtctgcctccctggccaagcagggtttgtgatcaggcccctggggcggtcaataattgtggagaggagagaatgagagagtgtggaaaaaaaaagaataatgacccggcccccgccctctgcccccagctgctcctcgcagttcggttaattggttaatcacttaacctgcttttgtcactcggctttggctcgggacttcaaaatcagtgatgggagtaagagcaaatttcatctttccaaattgatgggtgggctagtaataaaatatttaaaaaaaaacattcaaaaacatggccacatccaacatttcctcaggcaattccttttgattcttttttcttccccctccatgtagaagagggagaaggagaggctctgaaagctgcttctgggggatttcaagggactgggggtgccaaccacctctggccctgttgtgggggtgtcacagaggcagtggcagcaacaaaggatttgaaacttggtgtgttcgtggagccacaggcagacgatgtcaaccttgtgtgagtgtgacgggggttggggtggggcgggaggccacgggggaggccgaggcaggggctgggcagaggggagaggaagcacaagaagtgggagtgggagaggaagccacgtgctggagagtagacatccccctccttgccgctgggagagccaaggcctatgccacctgcagcgtctgagcggccgcctgtccttggtggccgggggtgggggcctgctgtgggtcagtgtgccaccctctgcagggcagcctgtgggagaagggacagcgggtaaaaagagaaggcaagctggcaggagggtggcacttcgtggatgacctccttagaaaagactgaccttgatgtcttgagagcgctggcctcttcctccctccctgcagggtagggggcctgagttgaggggcttccctctgctccacagaaaccctgttttattgagttctgaaggttggaactgctgccatgattttggccactttgcagacctgggactttagggctaaccagttctctttgtaaggacttgtgcctcttgggagacgtccacccgtttccaagcctgggccactggcatctctggagtgtgtgggggtctgggaggcaggtcccgagccccctgtccttcccacggccactgcagtcaccccgtctgcgccgctgtgctgttgtctgccgtgagagcccaatcactgcctatacccctcatcacacgtcacaatgtcccgaattcccagcctcaccaccccttctcagtaatgaccctggttggttgcaggaggtacctactccatactgagggtgaaattaagggaaggcaaagtccaggcacaagagtgggaccccagcctctcactctcagttccactcatccaactgggaccctcaccacgaatctcatgatctgattcggttccctgtctcctcctcccgtcacagatgtgagccagggcactgctcagctgtgaccctaggtgtttctgccttgttgacatggagagagccctttcccctgagaaggcctggccccttcctgtgctgagcccacagcagcaggctgggtgtcttggttgtcagtggtggcaccaggatggaagggcaaggcacccagggcaggcccacagtcccgctgtcccccacttgcaccctagcttgtagctgccaacctcccagacagcccagcccgctgctcagctccacatgcatagtatcagccctccacacccgacaaaggggaacacacccccttggaaatggttcttttcccccagtcccagctggaagccatgctgtctgttctgctggagcagctgaacatatacatagatgttgccctgccctccccatctgcaccctgttgagttgtagttggatttgtctgtttatgcttggattcaccagagtgactatgatagtgaaaagaaaaaaaaaaaaaaaaaaggacgcatgtatcttgaaatgcttgtaaagaggtttctaacccaccctcacgaggtgtctctcacccccacactgggactcgtgtggcctgtgtggtgccaccctgctggggcctcccaagttttgaaaggctttcctcagcacctgggacccaacagagaccagcttctagcagctaaggaggccgttcagctgtgacgaaggcctgaagcacaggattaggactgaagcgatgatgtccccttccctacttccccttggggctccctgtgtcagggcacagactaggtcttgtggctggtctggcttgcggcgcgaggatggttctctctggtcatagcccgaagtctcatggcagtcccaaaggaggcttacaactcctgcatcacaagaaaaaggaagccactgccagctggggggatctgcagctcccagaagctccgtgagcctcagccacccctcagactgggttcctctccaagctcgccctctggaggggcagcgcagcctcccaccaagggccctgcgaccacagcagggattgggatgaattgcctgtcctggatctgctctagaggcccaagctgcctgcctgaggaaggatgacttgacaagtcaggagacactgttcccaaagccttgaccagagcacctcagcccgctgaccttgcacaaactccatctgctgccatgagaaaagggaagccgcctttgcaaaacattgctgcctaaagaaactcagcagcctcaggcccaattctgccacttctggtttgggtacagttaaaggcaaccctgagggacttggcagtagaaatccagggcctcccctggggctggcagcttcgtgtgcagctagagctttacctgaaaggaagtctctgggcccagaactctccaccaagagcctccctgccgttcgctgagtcccagcaattctcctaagttgaagggatctgagaaggagaaggaaatgtggggtagatttggtggtggttagagatatgcccccctcattactgccaacagtttcggctgcatttcttcacgcacctcggttcctcttcctgaagttcttgtgccctgctcttcagcaccatgggccttcttatacggaaggctctgggatctcccccttgtggggcaggctcttggggccagcctaagatcatggtttagggtgatcagtgctggcagataaattgaaaaggcacgctggcttgtgatcttaaatgaggacaatccccccagggctgggcactcctcccctcccctcacttctcccacctgcagagccagtgtccttgggtgggctagataggatatactgtatgccggctccttcaagctgctgactcactttatcaatagttccatttaaattgacttcagtggtgagactgtatcctgtttgctattgcttgttgtgctatggggggaggggggaggaatgtgtaagatagttaacatgggcaaagggagatcttggggtgcagcacttaaactgcctcgtaacccttttcatgatttcaaccacatttgctagagggagggagcagccacggagttagaggcccttggggtttctcttttccactgacaggctttcccaggcagctggctagttcattccctccccagccaggtgcaggcgtaggaatatggacatctggttgctttggcctgctgccctctttcaggggtcctaagcccacaatcatgcctccctaagaccttggcatccttccctctaagccgttggcacctctgtgccacctctcacactggctccagacacacagcctgtgcttttggagctgagatcactcgcttcaccctcctcatctttgttctccaagtaaagccacgaggtcggggcgagggcagaggtgatcacctgcgtgtcccatctacagacctgcagcttcataaaacttctgatttctcttcagctttgaaaagggttaccctgggcactggcctagagcctcacctcctaatagacttagccccatgagtttgccatgttgagcaggactatttctggcacttgcaagtcccatgatttcttcggtaattctgagggtggggggagggacatgaaatcatcttagcttagctttctgtctgtgaatgtctatatagtgtattgtgtgttttaacaaatgatttacactgactgttgctgtaaaagtgaatttggaaataaagttattactctgattaaa

SEQ ID NO: 3950 - DNA, 5631 bp, Homo sapiens
  source 1..5631: mol_type = genomic DNA
ggacggccgagcggcagggcgctcgcgcgcgcccactagtggccggaggagaaggctcccgcggaggccgcgctgcccgccccctcccctggggaggctcgcgttcccgctgctcgcgcctgcgccgcccgccggcctcaggaacgcgccctcttcgccggcgcgcgccctcgcagtcaccgccacccaccagctccggcaccaacagcagcgccgctgccaccgcccaccttctgccgccgccaccacagccaccttctcctcctccgctgtcctctcccgtcctcgcctctgtcgactatcaggtgaactttgaaccaggatggctgagccccgccaggagttcgaagtgatggaagatcacgctgggacgtacgggttgggggacaggaaagatcaggggggctacaccatgcaccaagaccaagagggtgacacggacgctggcctgaaagaatctcccctgcagacccccactgaggacggatctgaggaaccgggctctgaaacctctgatgctaagagcactccaacagcggaagctgaagaagcaggcattggagacacccccagcctggaagacgaagctgctggtcacgtgacccaagctcgcatggtcagtaaaagcaaagacgggactggaagcgatgacaaaaaagccaagggggctgatggtaaaacgaagatcgccacaccgcggggagcagcccctccaggccagaagggccaggccaacgccaccaggattccagcaaaaaccccgcccgctccaaagacaccacccagctctggtgaacctccaaaatcaggggatcgcagcggctacagcagccccggctccccaggcactcccggcagccgctcccgcaccccgtcccttccaaccccacccacccgggagcccaagaaggtggcagtggtccgtactccacccaagtcgccgtcttccgccaagagccgcctgcagacagcccccgtgcccatgccagacctgaagaatgtcaagtccaagatcggctccactgagaacctgaagcaccagccgggaggcgggaaggtgcaaatagtctacaaaccagttgacctgagcaaggtgacctccaagtgtggctcattaggcaacatccatcataaaccaggaggtggccaggtggaagtaaaatctgagaagcttgacttcaaggacagagtccagtcgaagattgggtccctggacaatatcacccacgtccctggcggaggaaataaaaagattgaaacccacaagctgaccttccgcgagaacgccaaagccaagacagaccacggggcggagatcgtgtacaagtcgccagtggtgtctggggacacgtctccacggcatctcagcaatgtctcctccaccggcagcatcgacatggtagactcgccccagctcgccacgctagctgacgaggtgtctgcctccctggccaagcagggtttgtgatcaggcccctggggcggtcaataattgtggagaggagagaatgagagagtgtggaaaaaaaaagaataatgacccggcccccgccctctgcccccagctgctcctcgcagttcggttaattggttaatcacttaacctgcttttgtcactcggctttggctcgggacttcaaaatcagtgatgggagtaagagcaaatttcatctttccaaattgatgggtgggctagtaataaaatatttaaaaaaaaacattcaaaaacatggccacatccaacatttcctcaggcaattccttttgattcttttttcttccccctccatgtagaagagggagaaggagaggctctgaaagctgcttctgggggatttcaagggactgggggtgccaaccacctctggccctgttgtgggggtgtcacagaggcagtggcagcaacaaaggatttgaaacttggtgtgttcgtggagccacaggcagacgatgtcaaccttgtgtgagtgtgacgggggttggggtggggcgggaggccacgggggaggccgaggcaggggctgggcagaggggagaggaagcacaagaagtgggagtgggagaggaagccacgtgctggagagtagacatccccctccttgccgctgggagagccaaggcctatgccacctgcagcgtctgagcggccgcctgtccttggtggccgggggtgggggcctgctgtgggtcagtgtgccaccctctgcagggcagcctgtgggagaagggacagcgggtaaaaagagaaggcaagctggcaggagggtggcacttcgtggatgacctccttagaaaagactgaccttgatgtcttgagagcgctggcctcttcctccctccctgcagggtagggggcctgagttgaggggcttccctctgctccacagaaaccctgttttattgagttctgaaggttggaactgctgccatgattttggccactttgcagacctgggactttagggctaaccagttctctttgtaaggacttgtgcctcttgggagacgtccacccgtttccaagcctgggccactggcatctctggagtgtgtgggggtctgggaggcaggtcccgagccccctgtccttcccacggccactgcagtcaccccgtctgcgccgctgtgctgttgtctgccgtgagagcccaatcactgcctatacccctcatcacacgtcacaatgtcccgaattcccagcctcaccaccccttctcagtaatgaccctggttggttgcaggaggtacctactccatactgagggtgaaattaagggaaggcaaagtccaggcacaagagtgggaccccagcctctcactctcagttccactcatccaactgggaccctcaccacgaatctcatgatctgattcggttccctgtctcctcctcccgtcacagatgtgagccagggcactgctcagctgtgaccctaggtgtttctgccttgttgacatggagagagccctttcccctgagaaggcctggccccttcctgtgctgagcccacagcagcaggctgggtgtcttggttgtcagtggtggcaccaggatggaagggcaaggcacccagggcaggcccacagtcccgctgtcccccacttgcaccctagcttgtagctgccaacctcccagacagcccagcccgctgctcagctccacatgcatagtatcagccctccacacccgacaaaggggaacacacccccttggaaatggttcttttcccccagtcccagctggaagccatgctgtctgttctgctggagcagctgaacatatacatagatgttgccctgccctccccatctgcaccctgttgagttgtagttggatttgtctgtttatgcttggattcaccagagtgactatgatagtgaaaagaaaaaaaaaaaaaaaaaaggacgcatgtatcttgaaatgcttgtaaagaggtttctaacccaccctcacgaggtgtctctcacccccacactgggactcgtgtggcctgtgtggtgccaccctgctggggcctcccaagttttgaaaggctttcctcagcacctgggacccaacagagaccagcttctagcagctaaggaggccgttcagctgtgacgaaggcctgaagcacaggattaggactgaagcgatgatgtccccttccctacttccccttggggctccctgtgtcagggcacagactaggtcttgtggctggtctggcttgcggcgcgaggatggttctctctggtcatagcccgaagtctcatggcagtcccaaaggaggcttacaactcctgcatcacaagaaaaaggaagccactgccagctggggggatctgcagctcccagaagctccgtgagcctcagccacccctcagactgggttcctctccaagctcgccctctggaggggcagcgcagcctcccaccaagggccctgcgaccacagcagggattgggatgaattgcctgtcctggatctgctctagaggcccaagctgcctgcctgaggaaggatgacttgacaagtcaggagacactgttcccaaagccttgaccagagcacctcagcccgctgaccttgcacaaactccatctgctgccatgagaaaagggaagccgcctttgcaaaacattgctgcctaaagaaactcagcagcctcaggcccaattctgccacttctggtttgggtacagttaaaggcaaccctgagggacttggcagtagaaatccagggcctcccctggggctggcagcttcgtgtgcagctagagctttacctgaaaggaagtctctgggcccagaactctccaccaagagcctccctgccgttcgctgagtcccagcaattctcctaagttgaagggatctgagaaggagaaggaaatgtggggtagatttggtggtggttagagatatgcccccctcattactgccaacagtttcggctgcatttcttcacgcacctcggttcctcttcctgaagttcttgtgccctgctcttcagcaccatgggccttcttatacggaaggctctgggatctcccccttgtggggcaggctcttggggccagcctaagatcatggtttagggtgatcagtgctggcagataaattgaaaaggcacgctggcttgtgatcttaaatgaggacaatccccccagggctgggcactcctcccctcccctcacttctcccacctgcagagccagtgtccttgggtgggctagataggatatactgtatgccggctccttcaagctgctgactcactttatcaatagttccatttaaattgacttcagtggtgagactgtatcctgtttgctattgcttgttgtgctatggggggaggggggaggaatgtgtaagatagttaacatgggcaaagggagatcttggggtgcagcacttaaactgcctcgtaacccttttcatgatttcaaccacatttgctagagggagggagcagccacggagttagaggcccttggggtttctcttttccactgacaggctttcccaggcagctggctagttcattccctccccagccaggtgcaggcgtaggaatatggacatctggttgctttggcctgctgccctctttcaggggtcctaagcccacaatcatgcctccctaagaccttggcatccttccctctaagccgttggcacctctgtgccacctctcacactggctccagacacacagcctgtgcttttggagctgagatcactcgcttcaccctcctcatctttgttctccaagtaaagccacgaggtcggggcgagggcagaggtgatcacctgcgtgtcccatctacagacctgcagcttcataaaacttctgatttctcttcagctttgaaaagggttaccctgggcactggcctagagcctcacctcctaatagacttagccccatgagtttgccatgttgagcaggactatttctggcacttgcaagtcccatgatttcttcggtaattctgagggtggggggagggacatgaaatcatcttagcttagctttctgtctgtgaatgtctatatagtgtattgtgtgttttaacaaatgatttacactgactgttgctgtaaaagtgaatttggaaataaagttattactctgattaaa

SEQ ID NO: 3951 - DNA, 5718 bp, Homo sapiens
  source 1..5718: mol_type = genomic DNA
ggacggccgagcggcagggcgctcgcgcgcgcccactagtggccggaggagaaggctcccgcggaggccgcgctgcccgccccctcccctggggaggctcgcgttcccgctgctcgcgcctgcgccgcccgccggcctcaggaacgcgccctcttcgccggcgcgcgccctcgcagtcaccgccacccaccagctccggcaccaacagcagcgccgctgccaccgcccaccttctgccgccgccaccacagccaccttctcctcctccgctgtcctctcccgtcctcgcctctgtcgactatcaggtgaactttgaaccaggatggctgagccccgccaggagttcgaagtgatggaagatcacgctgggacgtacgggttgggggacaggaaagatcaggggggctacaccatgcaccaagaccaagagggtgacacggacgctggcctgaaagaatctcccctgcagacccccactgaggacggatctgaggaaccgggctctgaaacctctgatgctaagagcactccaacagcggaagatgtgacagcacccttagtggatgagggagctcccggcaagcaggctgccgcgcagccccacacggagatcccagaaggaaccacagctgaagaagcaggcattggagacacccccagcctggaagacgaagctgctggtcacgtgacccaagctcgcatggtcagtaaaagcaaagacgggactggaagcgatgacaaaaaagccaagggggctgatggtaaaacgaagatcgccacaccgcggggagcagcccctccaggccagaagggccaggccaacgccaccaggattccagcaaaaaccccgcccgctccaaagacaccacccagctctggtgaacctccaaaatcaggggatcgcagcggctacagcagccccggctccccaggcactcccggcagccgctcccgcaccccgtcccttccaaccccacccacccgggagcccaagaaggtggcagtggtccgtactccacccaagtcgccgtcttccgccaagagccgcctgcagacagcccccgtgcccatgccagacctgaagaatgtcaagtccaagatcggctccactgagaacctgaagcaccagccgggaggcgggaaggtgcaaatagtctacaaaccagttgacctgagcaaggtgacctccaagtgtggctcattaggcaacatccatcataaaccaggaggtggccaggtggaagtaaaatctgagaagcttgacttcaaggacagagtccagtcgaagattgggtccctggacaatatcacccacgtccctggcggaggaaataaaaagattgaaacccacaagctgaccttccgcgagaacgccaaagccaagacagaccacggggcggagatcgtgtacaagtcgccagtggtgtctggggacacgtctccacggcatctcagcaatgtctcctccaccggcagcatcgacatggtagactcgccccagctcgccacgctagctgacgaggtgtctgcctccctggccaagcagggtttgtgatcaggcccctggggcggtcaataattgtggagaggagagaatgagagagtgtggaaaaaaaaagaataatgacccggcccccgccctctgcccccagctgctcctcgcagttcggttaattggttaatcacttaacctgcttttgtcactcggctttggctcgggacttcaaaatcagtgatgggagtaagagcaaatttcatctttccaaattgatgggtgggctagtaataaaatatttaaaaaaaaacattcaaaaacatggccacatccaacatttcctcaggcaattccttttgattcttttttcttccccctccatgtagaagagggagaaggagaggctctgaaagctgcttctgggggatttcaagggactgggggtgccaaccacctctggccctgttgtgggggtgtcacagaggcagtggcagcaacaaaggatttgaaacttggtgtgttcgtggagccacaggcagacgatgtcaaccttgtgtgagtgtgacgggggttggggtggggcgggaggccacgggggaggccgaggcaggggctgggcagaggggagaggaagcacaagaagtgggagtgggagaggaagccacgtgctggagagtagacatccccctccttgccgctgggagagccaaggcctatgccacctgcagcgtctgagcggccgcctgtccttggtggccgggggtgggggcctgctgtgggtcagtgtgccaccctctgcagggcagcctgtgggagaagggacagcgggtaaaaagagaaggcaagctggcaggagggtggcacttcgtggatgacctccttagaaaagactgaccttgatgtcttgagagcgctggcctcttcctccctccctgcagggtagggggcctgagttgaggggcttccctctgctccacagaaaccctgttttattgagttctgaaggttggaactgctgccatgattttggccactttgcagacctgggactttagggctaaccagttctctttgtaaggacttgtgcctcttgggagacgtccacccgtttccaagcctgggccactggcatctctggagtgtgtgggggtctgggaggcaggtcccgagccccctgtccttcccacggccactgcagtcaccccgtctgcgccgctgtgctgttgtctgccgtgagagcccaatcactgcctatacccctcatcacacgtcacaatgtcccgaattcccagcctcaccaccccttctcagtaatgaccctggttggttgcaggaggtacctactccatactgagggtgaaattaagggaaggcaaagtccaggcacaagagtgggaccccagcctctcactctcagttccactcatccaactgggaccctcaccacgaatctcatgatctgattcggttccctgtctcctcctcccgtcacagatgtgagccagggcactgctcagctgtgaccctaggtgtttctgccttgttgacatggagagagccctttcccctgagaaggcctggccccttcctgtgctgagcccacagcagcaggctgggtgtcttggttgtcagtggtggcaccaggatggaagggcaaggcacccagggcaggcccacagtcccgctgtcccccacttgcaccctagcttgtagctgccaacctcccagacagcccagcccgctgctcagctccacatgcatagtatcagccctccacacccgacaaaggggaacacacccccttggaaatggttcttttcccccagtcccagctggaagccatgctgtctgttctgctggagcagctgaacatatacatagatgttgccctgccctccccatctgcaccctgttgagttgtagttggatttgtctgtttatgcttggattcaccagagtgactatgatagtgaaaagaaaaaaaaaaaaaaaaaaggacgcatgtatcttgaaatgcttgtaaagaggtttctaacccaccctcacgaggtgtctctcacccccacactgggactcgtgtggcctgtgtggtgccaccctgctggggcctcccaagttttgaaaggctttcctcagcacctgggacccaacagagaccagcttctagcagctaaggaggccgttcagctgtgacgaaggcctgaagcacaggattaggactgaagcgatgatgtccccttccctacttccccttggggctccctgtgtcagggcacagactaggtcttgtggctggtctggcttgcggcgcgaggatggttctctctggtcatagcccgaagtctcatggcagtcccaaaggaggcttacaactcctgcatcacaagaaaaaggaagccactgccagctggggggatctgcagctcccagaagctccgtgagcctcagccacccctcagactgggttcctctccaagctcgccctctggaggggcagcgcagcctcccaccaagggccctgcgaccacagcagggattgggatgaattgcctgtcctggatctgctctagaggcccaagctgcctgcctgaggaaggatgacttgacaagtcaggagacactgttcccaaagccttgaccagagcacctcagcccgctgaccttgcacaaactccatctgctgccatgagaaaagggaagccgcctttgcaaaacattgctgcctaaagaaactcagcagcctcaggcccaattctgccacttctggtttgggtacagttaaaggcaaccctgagggacttggcagtagaaatccagggcctcccctggggctggcagcttcgtgtgcagctagagctttacctgaaaggaagtctctgggcccagaactctccaccaagagcctccctgccgttcgctgagtcccagcaattctcctaagttgaagggatctgagaaggagaaggaaatgtggggtagatttggtggtggttagagatatgcccccctcattactgccaacagtttcggctgcatttcttcacgcacctcggttcctcttcctgaagttcttgtgccctgctcttcagcaccatgggccttcttatacggaaggctctgggatctcccccttgtggggcaggctcttggggccagcctaagatcatggtttagggtgatcagtgctggcagataaattgaaaaggcacgctggcttgtgatcttaaatgaggacaatccccccagggctgggcactcctcccctcccctcacttctcccacctgcagagccagtgtccttgggtgggctagataggatatactgtatgccggctccttcaagctgctgactcactttatcaatagttccatttaaattgacttcagtggtgagactgtatcctgtttgctattgcttgttgtgctatggggggaggggggaggaatgtgtaagatagttaacatgggcaaagggagatcttggggtgcagcacttaaactgcctcgtaacccttttcatgatttcaaccacatttgctagagggagggagcagccacggagttagaggcccttggggtttctcttttccactgacaggctttcccaggcagctggctagttcattccctccccagccaggtgcaggcgtaggaatatggacatctggttgctttggcctgctgccctctttcaggggtcctaagcccacaatcatgcctccctaagaccttggcatccttccctctaagccgttggcacctctgtgccacctctcacactggctccagacacacagcctgtgcttttggagctgagatcactcgcttcaccctcctcatctttgttctccaagtaaagccacgaggtcggggcgagggcagaggtgatcacctgcgtgtcccatctacagacctgcagcttcataaaacttctgatttctcttcagctttgaaaagggttaccctgggcactggcctagagcctcacctcctaatagacttagccccatgagtttgccatgttgagcaggactatttctggcacttgcaagtcccatgatttcttcggtaattctgagggtggggggagggacatgaaatcatcttagcttagctttctgtctgtgaatgtctatatagtgtattgtgtgttttaacaaatgatttacactgactgttgctgtaaaagtgaatttggaaataaagttattactctgattaaa

SEQ ID NO: 3952 - DNA, 21 bp, synthetic construct
  source 1..21: mol_type = other DNA
  misc_feature 1..19: note = RNA
  misc_feature 20..21: note = DNA
tgaagtcccgagccaaagctt

SEQ ID NO: 3953 - DNA, 21 bp, synthetic construct
  source 1..21: mol_type = other DNA
  misc_feature 1..19: note = RNA
  misc_feature 20..21: note = DNA
tggcgagtctaccatgtcgtt

SEQ ID NO: 3954 - DNA, 21 bp, synthetic construct
  source 1..21: mol_type = other DNA
  misc_feature 1..19: note = RNA
  misc_feature 20..21: note = DNA
ttaaccgaactgcgaggagtt

SEQ ID NO: 3955 - DNA, 21 bp, synthetic construct
  source 1..21: mol_type = other DNA
  misc_feature 1..19: note = RNA
  misc_feature 20..21: note = DNA
taagtcccgagccaaagcctt

SEQ ID NO: 3956 - DNA, 21 bp, synthetic construct
  source 1..21: mol_type = other DNA
  misc_feature 1..19: note = RNA
  misc_feature 20..21: note = DNA
tagtctaccatgtcgatgctt

SEQ ID NO: 3957 - DNA, 21 bp, synthetic construct
  source 1..21: mol_type = other DNA
  misc_feature 1..19: note = RNA
  misc_feature 20..21: note = DNA
taccgaactgcgaggagcatt

SEQ ID NO: 3958 - DNA, 21 bp, synthetic construct
  source 1..21: mol_type = other DNA
  misc_feature 1..19: note = RNA
  misc_feature 20..21: note = DNA
taagacggcgacttgggtgtt

SEQ ID NO: 3959 - DNA, 21 bp, synthetic construct
  source 1..21: mol_type = other DNA
  misc_feature 1..19: note = RNA
  misc_feature 20..21: note = DNA
tattaaccgaactgcgaggtt

SEQ ID NO: 3960 - DNA, 21 bp, synthetic construct
  source 1..21: mol_type = other DNA
  misc_feature 1..19: note = RNA
  misc_feature 20..21: note = DNA
tttaaccgaactgcgaggatt

SEQ ID NO: 3961 - DNA, 21 bp, synthetic construct
  source 1..21: mol_type = other DNA
  misc_feature 1..19: note = RNA
  misc_feature 20..21: note = DNA
ttctcgcggaaggtcagcttt

SEQ ID NO: 3962 - DNA, 21 bp, synthetic construct
  source 1..21: mol_type = other DNA
  misc_feature 1..19: note = RNA
  misc_feature 20..21: note = DNA
tttgtcatcgcttccagtctt

SEQ ID NO: 3963 - DNA, 21 bp, synthetic construct
  source 1..21: mol_type = other DNA
  misc_feature 1..19: note = RNA
  misc_feature 20..21: note = DNA
tttactgaccatgcgagcttt

SEQ ID NO: 3964 - DNA, 21 bp, synthetic construct
  source 1..21: mol_type = other DNA
  misc_feature 1..19: note = RNA
  misc_feature 20..21: note = DNA
ttcaactggtttgtagacttt

SEQ ID NO: 3965 - DNA, 21 bp, synthetic construct
  source 1..21: mol_type = other DNA
  misc_feature 1..19: note = RNA
  misc_feature 20..21: note = DNA
taaccgaactgcgaggagctt

SEQ ID NO: 3966 - DNA, 21 bp, synthetic construct
  source 1..21: mol_type = other DNA
  misc_feature 1..19: note = RNA
  misc_feature 20..21: note = DNA
tttggcgttctcgcggaagtt

SEQ ID NO: 3967 - DNA, 21 bp, synthetic construct
  source 1..21: mol_type = other DNA
  misc_feature 1..19: note = RNA
  misc_feature 20..21: note = DNA
ttactcccatcactgattttt

SEQ ID NO: 3968 - DNA, 21 bp, synthetic construct
  source 1..21: mol_type = other DNA
  misc_feature 1..19: note = RNA
  misc_feature 20..21: note = DNA
tttggcggaagacggcgactt

SEQ ID NO: 3969 - DNA, 21 bp, synthetic construct
  source 1..21: mol_type = other DNA
  misc_feature 1..19: note = RNA
  misc_feature 20..21: note = DNA
tcgatcttcgttttaccattt

SEQ ID NO: 3970 - DNA, 21 bp, synthetic construct
  source 1..21: mol_type = other DNA
  misc_feature 1..19: note = RNA
  misc_feature 20..21: note = DNA
tcggtgtggcgatcttcgttt

SEQ ID NO: 3971 - DNA, 21 bp, synthetic construct
  source 1..21: mol_type = other DNA
  misc_feature 1..19: note = RNA
  misc_feature 20..21: note = DNA
tccaattaaccgaactgcgtt

SEQ ID NO: 3972 - DNA, 21 bp, synthetic construct
  source 1..21: mol_type = other DNA
  misc_feature 1..19: note = RNA
  misc_feature 20..21: note = DNA
tgcgacttgggtggagtactt

SEQ ID NO: 3973 - DNA, 21 bp, synthetic construct
  source 1..21: mol_type = other DNA
  misc_feature 1..19: note = RNA
  misc_feature 20..21: note = DNA
ttcccgagccaaagccgagtt

SEQ ID NO: 3974 - DNA, 21 bp, synthetic construct
  source 1..21: mol_type = other DNA
  misc_feature 1..19: note = RNA
  misc_feature 20..21: note = DNA
tattgaccgccccaggggctt

SEQ ID NO: 3975 - DNA, 21 bp, synthetic construct
  source 1..21: mol_type = other DNA
  misc_feature 1..19: note = RNA
  misc_feature 20..21: note = DNA
taattaaccgaactgcgagtt

SEQ ID NO: 3976 - DNA, 21 bp, synthetic construct
  source 1..21: mol_type = other DNA
  misc_feature 1..19: note = RNA
  misc_feature 20..21: note = DNA
tcttggcggaagacggcgatt

SEQ ID NO: 3977 - DNA, 21 bp, synthetic construct
  source 1..21: mol_type = other DNA
  misc_feature 1..19: note = RNA
  misc_feature 20..21: note = DNA
tatcgcttccagtcccgtctt

SEQ ID NO: 3978 - DNA, 21 bp, synthetic construct
  source 1..21: mol_type = other DNA
  misc_feature 1..19: note = RNA
  misc_feature 20..21: note = DNA
tgcgatcttcgttttaccatt

SEQ ID NO: 3979 - DNA, 21 bp, synthetic construct
  source 1..21: mol_type = other DNA
  misc_feature 1..19: note = RNA
  misc_feature 20..21: note = DNA
ttggcgatcttcgttttactt

SEQ ID NO: 3980 - DNA, 21 bp, synthetic construct
  source 1..21: mol_type = other DNA
  misc_feature 1..19: note = RNA
  misc_feature 20..21: note = DNA
tggacgtgggtgatattgttt

SEQ ID NO: 3981 - DNA, 21 bp, synthetic construct
  source 1..21: mol_type = other DNA
  misc_feature 1..19: note = RNA
  misc_feature 20..21: note = DNA
ttggcgttctcgcggaaggtt

SEQ ID NO: 3982 - DNA, 21 bp, synthetic construct
  source 1..21: mol_type = other DNA
  misc_feature 1..19: note = RNA
  misc_feature 20..21: note = DNA
tgttttaccatcagccccctt

SEQ ID NO: 3983 - DNA, 21 bp, synthetic construct
  source 1..21: mol_type = other DNA
  misc_feature 1..19: note = RNA
  misc_feature 20..21: note = DNA
tctcttggcggaagacggctt

SEQ ID NO: 3984 - DNA, 21 bp, synthetic construct
  source 1..21: mol_type = other DNA
  misc_feature 1..19: note = RNA
  misc_feature 20..21: note = DNA
tatgtcgatgctgccggtgtt

SEQ ID NO: 3985 - DNA, 21 bp, synthetic construct
  source 1..21: mol_type = other DNA
  misc_feature 1..19: note = RNA
  misc_feature 20..21: note = DNA
ttcccgtctttgcttttactt

SEQ ID NO: 3986 - DNA, 21 bp, synthetic construct
  source 1..21: mol_type = other DNA
  misc_feature 1..19: note = RNA
  misc_feature 20..21: note = DNA
tagggtgggttagaaaccttt

SEQ ID NO: 3987 - DNA, 21 bp, synthetic construct
  source 1..21: mol_type = other DNA
  misc_feature 1..19: note = RNA
  misc_feature 20..21: note = DNA
ttttggcgttctcgcggaatt

SEQ ID NO: 3988 - DNA, 21 bp, synthetic construct
  source 1..21: mol_type = other DNA
  misc_feature 1..19: note = RNA
  misc_feature 20..21: note = DNA
tgcgttctcgcggaaggtctt

SEQ ID NO: 3989 - DNA, 21 bp, synthetic construct
  source 1..21: mol_type = other DNA
  misc_feature 1..19: note = RNA
  misc_feature 20..21: note = DNA
ttcgtcagctagcgtggcgtt

SEQ ID NO: 3990 - DNA, 21 bp, synthetic construct
  source 1..21: mol_type = other DNA
  misc_feature 1..19: note = RNA
  misc_feature 20..21: note = DNA
ttagatgggacacgcaggttt

SEQ ID NO: 3991 - DNA, 21 bp, synthetic construct
  source 1..21: mol_type = other DNA
  misc_feature 1..19: note = RNA
  misc_feature 20..21: note = DNA
ttagcgtggcgagctggggtt

SEQ ID NO: 3992 - DNA, 21 bp, synthetic construct
  source 1..21: mol_type = other DNA
  misc_feature 1..19: note = RNA
  misc_feature 20..21: note = DNA
ttcgtcacagctgaacggctt

SEQ ID NO: 3993 - DNA, 21 bp, synthetic construct
  source 1..21: mol_type = other DNA
  misc_feature 1..19: note = RNA
  misc_feature 20..21: note = DNA
tcttcgttttaccatcagctt

SEQ ID NO: 3994 - DNA, 21 bp, synthetic construct
  source 1..21: mol_type = other DNA
  misc_feature 1..19: note = RNA
  misc_feature 20..21: note = DNA
tgggtgagagacacctcgttt

SEQ ID NO: 3995 - DNA, 21 bp, synthetic construct
  source 1..21: mol_type = other DNA
  misc_feature 1..19: note = RNA
  misc_feature 20..21: note = DNA
tatgatcttaggctggccctt

SEQ ID NO: 3996 - DNA, 21 bp, synthetic construct
  source 1..21: mol_type = other DNA
  misc_feature 1..19: note = RNA
  misc_feature 20..21: note = DNA
ttcgtgagggtgggttagatt

SEQ ID NO: 3997 - DNA, 21 bp, synthetic construct
  source 1..21: mol_type = other DNA
  misc_feature 1..19: note = RNA
  misc_feature 20..21: note = DNA
tgggttagaaacctctttatt

SEQ ID NO: 3998 - DNA, 21 bp, synthetic construct
  source 1..21: mol_type = other DNA
  misc_feature 1..19: note = RNA
  misc_feature 20..21: note = DNA
tagtctattaggaggtgagtt

SEQ ID NO: 3999 - DNA, 21 bp, synthetic construct
  source 1..21: mol_type = other DNA
  misc_feature 1..19: note = RNA
  misc_feature 20..21: note = DNA
tccggcatacagtatatcctt

SEQ ID NO: 4000 - DNA, 21 bp, synthetic construct
  source 1..21: mol_type = other DNA
  misc_feature 1..19: note = RNA
  misc_feature 20..21: note = DNA
tagacacctcgtgagggtgtt

SEQ ID NO: 4001 - DNA, 21 bp, synthetic construct
  source 1..21: mol_type = other DNA
  misc_feature 1..19: note = RNA
  misc_feature 20..21: note = DNA
tacctcgtcagctagcgtgtt

SEQ ID NO: 4002 - DNA, 21 bp, synthetic construct
  source 1..21: mol_type = other DNA
  misc_feature 1..19: note = RNA
  misc_feature 20..21: note = DNA
taccgaagaaatcatgggatt

SEQ ID NO: 4003 - DNA, 21 bp, synthetic construct
  source 1..21: mol_type = other DNA
  misc_feature 1..19: note = RNA
  misc_feature 20..21: note = DNA
taatccaactacaactcaatt

SEQ ID NO: 4004 - DNA, 21 bp, synthetic construct
  source 1..21: mol_type = other DNA
  misc_feature 1..19: note = RNA
  misc_feature 20..21: note = DNA
ttgtagatgggacacgcagtt

SEQ ID NO: 4005 - DNA, 21 bp, synthetic construct
  source 1..21: mol_type = other DNA
  misc_feature 1..19: note = RNA
  misc_feature 20..21: note = DNA
tatccaactacaactcaactt

SEQ ID NO: 4006 - DNA, 21 bp, synthetic construct
  source 1..21: mol_type = other DNA
  misc_feature 1..19: note = RNA
  misc_feature 20..21: note = DNA
tatatctctaaccaccacctt

SEQ ID NO: 4007 - DNA, 21 bp, synthetic construct
  source 1..21: mol_type = other DNA
  misc_feature 1..19: note = RNA
  misc_feature 20..21: note = DNA
tgtatatcctatctagccctt

SEQ ID NO: 4008 - DNA, 21 bp, synthetic construct
  source 1..21: mol_type = other DNA
  misc_feature 1..19: note = RNA
  misc_feature 20..21: note = DNA
tggtttttgctggaatccttt

SEQ ID NO: 4009 - DNA, 21 bp, synthetic construct
  source 1..21: mol_type = other DNA
  misc_feature 1..19: note = RNA
  misc_feature 20..21: note = DNA
tttgaccgccccaggggcctt

SEQ ID NO: 4010 - DNA, 21 bp, synthetic construct
  source 1..21: mol_type = other DNA
  misc_feature 1..19: note = RNA
  misc_feature 20..21: note = DNA
tatcgcttcagtcctaatctt

SEQ ID NO: 4011 - DNA, 21 bp, synthetic construct
  source 1..21: mol_type = other DNA
  misc_feature 1..19: note = RNA
  misc_feature 20..21: note = DNA
tcctttcaaaacttgggagtt

SEQ ID NO: 4012 - DNA, 21 bp, synthetic construct
  source 1..21: mol_type = other DNA
  misc_feature 1..19: note = RNA
  misc_feature 20..21: note = DNA
tgccgcaagccagaccagctt

SEQ ID NO: 4013 - DNA, 21 bp, synthetic construct
  source 1..21: mol_type = other DNA
  misc_feature 1..19: note = RNA
  misc_feature 20..21: note = DNA
tcagttggatgagtggaactt

SEQ ID NO: 4014 - DNA, 21 bp, synthetic construct
  source 1..21: mol_type = other DNA
  misc_feature 1..19: note = RNA
  misc_feature 20..21: note = DNA
ttaagtctattaggaggtgtt

SEQ ID NO: 4015 - DNA, 21 bp, synthetic construct
  source 1..21: mol_type = other DNA
  misc_feature 1..19: note = RNA
  misc_feature 20..21: note = DNA
tcgtgagggtgggttagaatt

SEQ ID NO: 4016 - DNA, 21 bp, synthetic construct
  source 1..21: mol_type = other DNA
  misc_feature 1..19: note = RNA
  misc_feature 20..21: note = DNA
taggcatgattgtgggctttt

SEQ ID NO: 4017 - DNA, 21 bp, synthetic construct
  source 1..21: mol_type = other DNA
  misc_feature 1..19: note = RNA
  misc_feature 20..21: note = DNA
tggcgttctcgcggaaggttt

SEQ ID NO: 4018 - DNA, 21 bp, synthetic construct
  source 1..21: mol_type = other DNA
  misc_feature 1..19: note = RNA
  misc_feature 20..21: note = DNA
tttgggtcacgtgaccagctt

SEQ ID NO: 4019 - DNA, 21 bp, synthetic construct
  source 1..21: mol_type = other DNA
  misc_feature 1..19: note = RNA
  misc_feature 20..21: note = DNA
tcctcgtgagggtgggttatt

SEQ ID NO: 4020 - DNA, 21 bp, synthetic construct
  source 1..21: mol_type = other DNA
  misc_feature 1..19: note = RNA
  misc_feature 20..21: note = DNA
ttgatgcaggagttgtaagtt

SEQ ID NO: 4021 - DNA, 21 bp, synthetic construct
  source 1..21: mol_type = other DNA
  misc_feature 1..19: note = RNA
  misc_feature 20..21: note = DNA
tgttagccctaaagtcccatt

SEQ ID NO: 4022 - DNA, 21 bp, synthetic construct
  source 1..21: mol_type = other DNA
  misc_feature 1..19: note = RNA
  misc_feature 20..21: note = DNA
tacatcgtctgcctgtggctt

SEQ ID NO: 4023 - DNA, 21 bp, synthetic construct
  source 1..21: mol_type = other DNA
  misc_feature 1..19: note = RNA
  misc_feature 20..21: note = DNA
tggacgtctcccaagaggctt

SEQ ID NO: 4024 - DNA, 21 bp, synthetic construct
  source 1..21: mol_type = other DNA
  misc_feature 1..19: note = RNA
  misc_feature 20..21: note = DNA
tatgaggggggcatatctctt

SEQ ID NO: 4025 - DNA, 21 bp, synthetic construct
  source 1..21: mol_type = other DNA
  misc_feature 1..19: note = RNA
  misc_feature 20..21: note = DNA
tgcctttcaaaacttgggatt

SEQ ID NO: 4026 - DNA, 21 bp, synthetic construct
  source 1..21: mol_type = other DNA
  misc_feature 1..19: note = RNA
  misc_feature 20..21: note = DNA
tttaatcagagtaataacttt

SEQ ID NO: 4027 - DNA, 21 bp, synthetic construct
  source 1..21: mol_type = other DNA
  misc_feature 1..19: note = RNA
  misc_feature 20..21: note = DNA
tagtaatgaggggggcatatt

SEQ ID NO: 4028 - DNA, 21 bp, synthetic construct
  source 1..21: mol_type = other DNA
  misc_feature 1..19: note = RNA
  misc_feature 20..21: note = DNA
ttgcgatcccctgattttgtt

SEQ ID NO: 4029 - DNA, 21 bp, synthetic construct
  source 1..21: mol_type = other DNA
  misc_feature 1..19: note = RNA
  misc_feature 20..21: note = DNA
ttctccgccccgtggtctgtt

SEQ ID NO: 4030 - DNA, 21 bp, synthetic construct
  source 1..21: mol_type = other DNA
  misc_feature 1..19: note = RNA
  misc_feature 20..21: note = DNA
tctatctagcccacccaagtt

SEQ ID NO: 4031 - DNA, 21 bp, synthetic construct
  source 1..21: mol_type = other DNA
  misc_feature 1..19: note = RNA
  misc_feature 20..21: note = DNA
tgtcagctagcgtggcgagtt

SEQ ID NO: 4032 - DNA, 21 bp, synthetic construct
  source 1..21: mol_type = other DNA
  misc_feature 1..19: note = RNA
  misc_feature 20..21: note = DNA
ttccaactacaactcaacatt

SEQ ID NO: 4033 - DNA, 21 bp, synthetic construct
  source 1..21: mol_type = other DNA
  misc_feature 1..19: note = RNA
  misc_feature 20..21: note = DNA
tgggcaacatctatgtatatt

SEQ ID NO: 4034 - DNA, 21 bp, synthetic construct
  source 1..21: mol_type = other DNA
  misc_feature 1..19: note = RNA
  misc_feature 20..21: note = DNA
tacctcgtgagggtgggtttt

SEQ ID NO: 4035 - DNA, 21 bp, synthetic construct
  source 1..21: mol_type = other DNA
  misc_feature 1..19: note = RNA
  misc_feature 20..21: note = DNA
tgaaatagtcctgctcaactt

SEQ ID NO: 4036 - DNA, 21 bp, synthetic construct
  source 1..21: mol_type = other DNA
  misc_feature 1..19: note = RNA
  misc_feature 20..21: note = DNA
tcctcgtcagctagcgtggtt

SEQ ID NO: 4037 - DNA, 21 bp, synthetic construct
  source 1..21: mol_type = other DNA
  misc_feature 1..19: note = RNA
  misc_feature 20..21: note = DNA
tggctaagtctattaggagtt

SEQ ID NO: 4038 - DNA, 21 bp, synthetic construct
  source 1..21: mol_type = other DNA
  misc_feature 1..19: note = RNA
  misc_feature 20..21: note = DNA
tagaattaccgaagaaatctt

SEQ ID NO: 4039 - DNA, 21 bp, synthetic construct
  source 1..21: mol_type = other DNA
  misc_feature 1..19: note = RNA
  misc_feature 20..21: note = DNA
tgtaagcctcctttgggactt

SEQ ID NO: 4040 - DNA, 21 bp, synthetic construct
  source 1..21: mol_type = other DNA
  misc_feature 1..19: note = RNA
  misc_feature 20..21: note = DNA
tggcatatctctaaccacctt

SEQ ID NO: 4041 - DNA, 21 bp, synthetic construct
  source 1..21: mol_type = other DNA
  misc_feature 1..19: note = RNA
  misc_feature 20..21: note = DNA
tagtatatcctatctagcctt

SEQ ID NO: 4042 - DNA, 21 bp, synthetic construct
  source 1..21: mol_type = other DNA
  misc_feature 1..19: note = RNA
  misc_feature 20..21: note = DNA
tatagtcactctggtgaattt

SEQ ID NO: 4043 - DNA, 21 bp, synthetic construct
  source 1..21: mol_type = other DNA
  misc_feature 1..19: note = RNA
  misc_feature 20..21: note = DNA
tgccggcatacagtatatctt

SEQ ID NO: 4044 - DNA, 21 bp, synthetic construct
  source 1..21: mol_type = other DNA
  misc_feature 1..19: note = RNA
  misc_feature 20..21: note = DNA
tccaatccctgctgtggtctt

SEQ ID NO: 4045 - DNA, 21 bp, synthetic construct
  source 1..21: mol_type = other DNA
  misc_feature 1..19: note = RNA
  misc_feature 20..21: note = DNA
tatcgtctgcctgtggctctt

SEQ ID NO: 4046 - DNA, 21 bp, synthetic construct
  source 1..21: mol_type = other DNA
  misc_feature 1..19: note = RNA
  misc_feature 20..21: note = DNA
tagacacctcgtcagctagtt

SEQ ID NO: 4047 - DNA, 21 bp, synthetic construct
  source 1..21: mol_type = other DNA
  misc_feature 1..19: note = RNA
  misc_feature 20..21: note = DNA
ttttaccatcagccccctttt

SEQ ID NO: 4048 - DNA, 21 bp, synthetic construct
  source 1..21: mol_type = other DNA
  misc_feature 1..19: note = RNA
  misc_feature 20..21: note = DNA
tccgctgcgatcccctgattt

SEQ ID NO: 4049 - DNA, 21 bp, synthetic construct
  source 1..21: mol_type = other DNA
  misc_feature 1..19: note = RNA
  misc_feature 20..21: note = DNA
tctagcgtggcgagctgggtt

SEQ ID NO: 4050 - DNA, 21 bp, synthetic construct
  source 1..21: mol_type = other DNA
  misc_feature 1..19: note = RNA
  misc_feature 20..21: note = DNA
tcttcgtcacagctgaacgtt

SEQ ID NO: 4051 - DNA, 21 bp, synthetic construct
  source 1..21: mol_type = other DNA
  misc_feature 1..19: note = RNA
  misc_feature 20..21: note = DNA
ttcatgggacttgcaagtgtt

SEQ ID NO: 4052 - DNA, 21 bp, synthetic construct
  source 1..21: mol_type = other DNA
  misc_feature 1..19: note = RNA
  misc_feature 20..21: note = DNA
ttatatcctatctagcccatt

SEQ ID NO: 4053 - DNA, 21 bp, synthetic construct
  source 1..21: mol_type = other DNA
  misc_feature 1..19: note = RNA
  misc_feature 20..21: note = DNA
tggtgaatccaagcataaatt

SEQ ID NO: 4054 - DNA, 21 bp, synthetic construct
  source 1..21: mol_type = other DNA
  misc_feature 1..19: note = RNA
  misc_feature 20..21: note = DNA
tgcgatcccctgattttggtt

SEQ ID NO: 4055 - DNA, 21 bp, synthetic construct
  source 1..21: mol_type = other DNA
  misc_feature 1..19: note = RNA
  misc_feature 20..21: note = DNA
tttcgtcacagctgaacggtt

SEQ ID NO: 4056 - DNA, 21 bp, synthetic construct
  source 1..21: mol_type = other DNA
  misc_feature 1..19: note = RNA
  misc_feature 20..21: note = DNA
tgaaatgttggatgtggcctt

SEQ ID NO: 4057 - DNA, 21 bp, synthetic construct
  source 1..21: mol_type = other DNA
  misc_feature 1..19: note = RNA
  misc_feature 20..21: note = DNA
taatggaactattgataaatt

SEQ ID NO: 4058 - DNA, 21 bp, synthetic construct
  source 1..21: mol_type = other DNA
  misc_feature 1..19: note = RNA
  misc_feature 20..21: note = DNA
tttgtacacgatctccgcctt

SEQ ID NO: 4059 - DNA, 21 bp, synthetic construct
  source 1..21: mol_type = other DNA
  misc_feature 1..19: note = RNA
  misc_feature 20..21: note = DNA
tcgtcagctagcgtggcgatt

SEQ ID NO: 4060 - DNA, 21 bp, synthetic construct
  source 1..21: mol_type = other DNA
  misc_feature 1..19: note = RNA
  misc_feature 20..21: note = DNA
ttcgcgccgcaagccagactt

SEQ ID NO: 4061 - DNA, 21 bp, synthetic construct
  source 1..21: mol_type = other DNA
  misc_feature 1..19: note = RNA
  misc_feature 20..21: note = DNA
tctaagtctattaggaggttt

SEQ ID NO: 4062 - protein, 18 aa, synthetic construct
KTVNGHDSPHSKAQNQQT

SEQ ID NO: 4063 - DNA, 21 bp, synthetic construct
  source 1..21: mol_type = other DNA
  misc_feature 1..19: note = RNA
  misc_feature 20..21: note = DNA
tccaccctcagaattaccgtt

SEQ ID NO: 4064 - DNA, 21 bp, synthetic construct
  source 1..21: mol_type = other DNA
  misc_feature 1..19: note = RNA
  misc_feature 20..21: note = DNA
ttcagaattaccgaagaaatt

SEQ ID NO: 4065 - DNA, 21 bp, synthetic construct
  source 1..21: mol_type = other DNA
  misc_feature 1..19: note = RNA
  misc_feature 20..21: note = DNA
ttacaactcaacagggtgctt

SEQ ID NO: 4066 - DNA, 21 bp, synthetic construct
  source 1..21: mol_type = other DNA
  misc_feature 1..19: note = RNA
  misc_feature 20..21: note = DNA
tagccggcatacagtatattt

SEQ ID NO: 4067 - DNA, 21 bp, synthetic construct
  source 1..21: mol_type = other DNA
  misc_feature 1..19: note = RNA
  misc_feature 20..21: note = DNA
ttgtacccaaaccagaagttt

SEQ ID NO: 4068 - DNA, 21 bp, synthetic construct
  source 1..21: mol_type = other DNA
  misc_feature 1..19: note = RNA
  misc_feature 20..21: note = DNA
tgtcctaatcctgtgcttctt

SEQ ID NO: 4069 - DNA, 21 bp, synthetic construct
  source 1..21: mol_type = other DNA
  misc_feature 1..19: note = RNA
  misc_feature 20..21: note = DNA
tgcttaggacccctgaaagtt

SEQ ID NO: 4070 - DNA, 21 bp, synthetic construct
  source 1..21: mol_type = other DNA
  misc_feature 1..19: note = RNA
  misc_feature 20..21: note = DNA
ttaatgaggggggcatatctt

SEQ ID NO: 4071 - DNA, 21 bp, synthetic construct
  source 1..21: mol_type = other DNA
  misc_feature 1..19: note = RNA
  misc_feature 20..21: note = DNA
tgctgaacggcctccttagtt

SEQ ID NO: 4072 - DNA, 21 bp, synthetic construct
  source 1..21: mol_type = other DNA
  misc_feature 1..19: note = RNA
  misc_feature 20..21: note = DNA
ttccaagggggtgtgttcctt

SEQ ID NO: 4073 - DNA, 21 bp, synthetic construct
  source 1..21: mol_type = other DNA
  misc_feature 1..19: note = RNA
  misc_feature 20..21: note = DNA
tcatgattgtgggcttaggtt

SEQ ID NO: 4074 - DNA, 21 bp, synthetic construct
  source 1..21: mol_type = other DNA
  misc_feature 1..19: note = RNA
  misc_feature 20..21: note = DNA
taaacttgggaggccccagtt

SEQ ID NO: 4075 - DNA, 21 bp, synthetic construct
  source 1..21: mol_type = other DNA
  misc_feature 1..19: note = RNA
  misc_feature 20..21: note = DNA
tgggtgcaagtgggggacatt

SEQ ID NO: 4076 - DNA, 21 bp, synthetic construct
  source 1..21: mol_type = other DNA
  misc_feature 1..19: note = RNA
  misc_feature 20..21: note = DNA
ttaatcagagtaataactttt

SEQ ID NO: 4077 - DNA, 21 bp, synthetic construct
  source 1..21: mol_type = other DNA
  misc_feature 1..19: note = RNA
  misc_feature 20..21: note = DNA
tcatggggctaagtctatttt

SEQ ID NO: 4078 - DNA, 21 bp, synthetic construct
  source 1..21: mol_type = other DNA
  misc_feature 1..19: note = RNA
  misc_feature 20..21: note = DNA
tcaaccagggtcattactgtt

SEQ ID NO: 4079 - DNA, 21 bp, synthetic construct
  source 1..21: mol_type = other DNA
  misc_feature 1..19: note = RNA
  misc_feature 20..21: note = DNA
ttatcttacacattcctcctt

SEQ ID NO: 4080 - DNA, 21 bp, synthetic construct
  source 1..21: mol_type = other DNA
  misc_feature 1..19: note = RNA
  misc_feature 20..21: note = DNA
tcttagggaggcatgattgtt

SEQ ID NO: 4081 - protein, 18 aa, synthetic construct
KTINGSGSPHKSGQNQQP

SEQ ID NO: 4082 - DNA, 21 bp, synthetic construct
  source 1..21: mol_type = other DNA
  misc_feature 1..19: note = RNA
  misc_feature 20..21: note = DNA
tattcctacgcctgcaccttt

SEQ ID NO: 4083 - DNA, 21 bp, synthetic construct
  source 1..21: mol_type = other DNA
  misc_feature 1..19: note = RNA
  misc_feature 20..21: note = DNA
tcatacagtatatcctatctt

SEQ ID NO: 4084 - DNA, 21 bp, synthetic construct
  source 1..21: mol_type = other DNA
  misc_feature 1..19: note = RNA
  misc_feature 20..21: note = DNA
tatgattgtgggcttaggatt

SEQ ID NO: 4085 - DNA, 21 bp, synthetic construct
  source 1..21: mol_type = other DNA
  misc_feature 1..19: note = RNA
  misc_feature 20..21: note = DNA
tcgtcacagctgaacggcctt

SEQ ID NO: 4086 - DNA, 21 bp, synthetic construct
  source 1..21: mol_type = other DNA
  misc_feature 1..19: note = RNA
  misc_feature 20..21: note = DNA
taaatgttggatgtggccatt

SEQ ID NO: 4087 - DNA, 21 bp, synthetic construct
  source 1..21: mol_type = other DNA
  misc_feature 1..19: note = RNA
  misc_feature 20..21: note = DNA
tgccagaaatagtcctgcttt

SEQ ID NO: 4088 - DNA, 21 bp, synthetic construct
  source 1..21: mol_type = other DNA
  misc_feature 1..19: note = RNA
  misc_feature 20..21: note = DNA
tgcaaccagatgtccatattt

SEQ ID NO: 4089 - DNA, 21 bp, synthetic construct
  source 1..21: mol_type = other DNA
  misc_feature 1..19: note = RNA
  misc_feature 20..21: note = DNA
tacaagctagggtgcaagttt

SEQ ID NO: 4090 - DNA, 21 bp, synthetic construct
  source 1..21: mol_type = other DNA
  misc_feature 1..19: note = RNA
  misc_feature 20..21: note = DNA
tggttagaaacctctttactt

SEQ ID NO: 4091 - DNA, 21 bp, synthetic construct
  source 1..21: mol_type = other DNA
  misc_feature 1..19: note = RNA
  misc_feature 20..21: note = DNA
tctattgataaagtgagtctt

SEQ ID NO: 4092 - DNA, 21 bp, synthetic construct
  source 1..21: mol_type = other DNA
  misc_feature 1..19: note = RNA
  misc_feature 20..21: note = DNA
ttaaagtgagtcagcagcttt

SEQ ID NO: 4093 - DNA, 21 bp, synthetic construct
  source 1..21: mol_type = other DNA
  misc_feature 1..19: note = RNA
  misc_feature 20..21: note = DNA
tgtgcccagggtaaccctttt

SEQ ID NO: 4094 - DNA, 21 bp, synthetic construct
  source 1..21: mol_type = other DNA
  misc_feature 1..19: note = RNA
  misc_feature 20..21: note = DNA
tgttagaaacctctttacatt

SEQ ID NO: 4095 - DNA, 21 bp, synthetic construct
  source 1..21: mol_type = other DNA
  misc_feature 1..19: note = RNA
  misc_feature 20..21: note = DNA
ttcctcgcgccgcaagccatt

SEQ ID NO: 4096 - DNA, 21 bp, synthetic construct
  source 1..21: mol_type = other DNA
  misc_feature 1..19: note = RNA
  misc_feature 20..21: note = DNA
tctcgtcagctagcgtggctt

SEQ ID NO: 4097 - DNA, 21 bp, synthetic construct
  source 1..21: mol_type = other DNA
  misc_feature 1..19: note = RNA
  misc_feature 20..21: note = DNA
tttgtaagcctcctttgggtt

SEQ ID NO: 4098 - protein, 18 aa, synthetic construct
KTISKRGSPHSKAQNQQT

SEQ ID NO: 4099 - protein, 18 aa, synthetic construct
KGLGGSGSPHSKAQNQQT

SEQ ID NO: 4100 - protein, 18 aa, synthetic construct
KTINGHDSPHSKAQNLQT

SEQ ID NO: 4101 - protein, 18 aa, synthetic construct
KTINGHDSPHSKAQNQQI

SEQ ID NO: 4102 - protein, 18 aa, synthetic construct
KTINGSGSPHFTRQNQQT

SEQ ID NO: 4103 - protein, 18 aa, synthetic construct
KTINGSGSPHSLPWNQQT

SEQ ID NO: 4104 - protein, 18 aa, synthetic construct
KTINGHDSPHSKAQNHQT

SEQ ID NO: 4105 - protein, 18 aa, synthetic construct
KTMNGHDSPHSKAQNQQT

SEQ ID NO: 4106 - protein, 18 aa, synthetic construct
KPYKGSGSPHSKAQNQQT

SEQ ID NO: 4107 - protein, 18 aa, synthetic construct
KRLWGSGSPHSKAQNQQT

SEQ ID NO: 4108 - protein, 18 aa, synthetic construct
KRMRGSGSPHSKAQNQQT

SEQ ID NO: 4109 - protein, 18 aa, synthetic construct
KRTYGSGSPHSKAQNQQT

SEQ ID NO: 4110 - protein, 18 aa, synthetic construct
KTINCLRSPHSKAQNQQT

SEQ ID NO: 4111 - protein, 18 aa, synthetic construct
KTINFSRSPHSKAQNQQT

SEQ ID NO: 4112 - protein, 18 aa, synthetic construct
KTINGLRSPHFKAQNQQT

SEQ ID NO: 4113 - protein, 18 aa, synthetic construct
KTINGNRSPHNKAQNQQT

SEQ ID NO: 4114 - protein, 18 aa, synthetic construct
KTINGPRSPHYKAQNQQT

SEQ ID NO: 4115 - protein, 18 aa, synthetic construct
KTINGQASPHWKAQNQQT

SEQ ID NO: 4116 - protein, 18 aa, synthetic construct
KTINGRCSPHSKAQNQQT

SEQ ID NO: 4117 - protein, 18 aa, synthetic construct
KTINGRHSPHSKAQNQQT

SEQ ID NO: 4118 - protein, 18 aa, synthetic construct
KTINGRKSPHRKAQNQQT

SEQ ID NO: 4119 - protein, 18 aa, synthetic construct
KTINGRLSPHWKAQNQQT

SEQ ID NO: 4120 - protein, 18 aa, synthetic construct
KTINGRLSPHYKAQNQQT

SEQ ID NO: 4121 - protein, 18 aa, synthetic construct
KTINGRPSPHMKAQNQQT

SEQ ID NO: 4122 - protein, 18 aa, synthetic construct
KTINGRSSPHWKAQNQQT

SEQ ID NO: 4123 - protein, 18 aa, synthetic construct
KTINGRWSPHSKAQNQQT

SEQ ID NO: 4124 - protein, 18 aa, synthetic construct
KTINGSGSPHAPCQNQQT

SEQ ID NO: 4125 - protein, 18 aa, synthetic construct
KTINGSGSPHAWAQNQQT

SEQ ID NO: 4126 - protein, 18 aa, synthetic construct
KTINGSGSPHCMRQNQQT

SEQ ID NO: 4127 - protein, 18 aa, synthetic construct
KTINGSGSPHFCSQNQQT

SEQ ID NO: 4128 - protein, 18 aa, synthetic construct
KTINGSGSPHFLFQNQQT

SEQ ID NO: 4129 - protein, 18 aa, synthetic construct
KTINGSGSPHFWAQNQQT

SEQ ID NO: 4130 - protein, 18 aa, synthetic construct
KTINGSGSPHLCAQNQQT

SEQ ID NO: 4131 - protein, 18 aa, synthetic construct
KTINGSGSPHLRYQNQQT

SEQ ID NO: 4132 - protein, 18 aa, synthetic construct
KTINGSGSPHLYYQNQQT

SEQ ID NO: 4133 - protein, 18 aa, synthetic construct
KTINGSGSPHPLCQNQQT

SEQ ID NO: 4134 - protein, 18 aa, synthetic construct
KTINGSGSPHRIRQNQQT

SEQ ID NO: 4135 - protein, 18 aa, synthetic construct
KTINGSGSPHRLFQNQQT

SEQ ID NO: 4136 - protein, 18 aa, synthetic construct
KTINGSGSPHSCGQNQQT

SEQ ID NO: 4137 - protein, 18 aa, synthetic construct
KTINGSGSPHSCLRNQQT

SEQ ID NO: 4138 - protein, 18 aa, synthetic construct
KTINGSGSPHSCLSNQQT

SEQ ID NO: 4139 - protein, 18 aa, synthetic construct
KTINGSGSPHSCRLNQQT

SEQ ID NO: 4140 - protein, 18 aa, synthetic construct
KTINGSGSPHSCSLNQQT

SEQ ID NO: 4141 - protein, 18 aa, synthetic construct
KTINGSGSPHSKACTLQT

SEQ ID NO: 4142 - protein, 18 aa, synthetic construct
KTINGSGSPHSKAFRAQT

SEQ ID NO: 4143 - protein, 18 aa, synthetic construct
KTINGSGSPHSKAIRKQT

SEQ ID NO: 4144 - protein, 18 aa, synthetic construct
KTINGSGSPHSKAQASRT

SEQ ID NO: 4145 - protein, 18 aa, synthetic construct
KTINGSGSPHSKAQFELT

SEQ ID NO: 4146 - protein, 18 aa, synthetic construct
KTINGSGSPHSKAQIVIT

SEQ ID NO: 4147 - protein, 18 aa, synthetic construct
KTINGSGSPHSKAQLART

SEQ ID NO: 4148 - protein, 18 aa, synthetic construct
KTINGSGSPHSKAQLQRT

SEQ ID NO: 4149 - protein, 18 aa, synthetic construct
KTINGSGSPHSKAQNARR

SEQ ID NO: 4150 - protein, 18 aa, synthetic construct
KTINGSGSPHSKAQNCPR

SEQ ID NO: 4151 - protein, 18 aa, synthetic construct
KTINGSGSPHSKAQNMRR

SEQ ID NO: 4152 - protein, 18 aa, synthetic construct
KTINGSGSPHSKAQNRRV

SEQ ID NO: 4153 - protein, 18 aa, synthetic construct
KTINGSGSPHSKAQPSRT

SEQ ID NO: 4154 - protein, 18 aa, synthetic construct
KTINGSGSPHSKAQQVKT

SEQ ID NO: 4155 - protein, 18 aa, synthetic construct
KTINGSGSPHSKAQQVRT

SEQ ID NO: 4156 - protein, 18 aa, synthetic construct
KTINGSGSPHSKAQRLKT

SEQ ID NO: 4157 - protein, 18 aa, synthetic construct
KTINGSGSPHSKAQRRAT

SEQ ID NO: 4158 - protein, 18 aa, synthetic construct
KTINGSGSPHSKAQRRGT

SEQ ID NO: 4159 - protein, 18 aa, synthetic construct
KTINGSGSPHSKAQRRRT

SEQ ID NO: 4160 - protein, 18 aa, synthetic construct
KTINGSGSPHSKAQRTRT

SEQ ID NO: 4161 - protein, 18 aa, synthetic construct
KTINGSGSPHSKAQRVHT

SEQ ID NO: 4162 - protein, 18 aa, synthetic construct
KTINGSGSPHSKAQTYRT

SEQ ID NO: 4163 - protein, 18 aa, synthetic construct
KTINGSGSPHSKAQVRKT

SEQ ID NO: 4164 - protein, 18 aa, synthetic construct
KTINGSGSPHSKARGRQT

SEQ ID NO: 4165 - protein, 18 aa, synthetic construct
KTINGSGSPHSKARLCQT

SEQ ID NO: 4166 - protein, 18 aa, synthetic construct
KTINGSGSPHSKARLKQT

SEQ ID NO: 4167 - protein, 18 aa, synthetic construct
KTINGSGSPHSKARNSQT

SEQ ID NO: 4168 - protein, 18 aa, synthetic construct
KTINGSGSPHSKARWVQT

SEQ ID NO: 4169 - protein, 18 aa, synthetic construct
KTINGSGSPHSKAVRWQT

SEQ ID NO: 4170 - protein, 18 aa, synthetic construct
KTINGSGSPHSKAYTRQT

SEQ ID NO: 4171 - protein, 18 aa, synthetic construct
KTINGSGSPHSKCQSQQT

SEQ ID NO: 4172 - protein, 18 aa, synthetic construct
KTINGSGSPHSKFLRQQT

SEQ ID NO: 4173 - protein, 18 aa, synthetic construct
KTINGSGSPHSKFRFQQT

SEQ ID NO: 4174 - protein, 18 aa, synthetic construct
KTINGSGSPHSKFRLQQT

SEQ ID NO: 4175 - protein, 18 aa, synthetic construct
KTINGSGSPHSKFRRQQT

SEQ ID NO: 4176 - protein, 18 aa, synthetic construct
KTINGSGSPHSKGMKQQT

SEQ ID NO: 4177 - protein, 18 aa, synthetic construct
KTINGSGSPHSKKLRQQT

SEQ ID NO: 4178 - protein, 18 aa, synthetic construct
KTINGSGSPHSKKRPQQT

SEQ ID NO: 4179 - protein, 18 aa, synthetic construct
KTINGSGSPHSKKSRQQT

SEQ ID NO: 4180 - protein, 18 aa, synthetic construct
KTINGSGSPHSKLYRQQT

SEQ ID NO: 4181 - protein, 18 aa, synthetic construct
KTINGSGSPHSKLYWQQT

SEQ ID NO: 4182 - protein, 18 aa, synthetic construct
KTINGSGSPHSKPRMQQT

SEQ ID NO: 4183 - protein, 18 aa, synthetic construct
KTINGSGSPHSKRFPQQT

SEQ ID NO: 4184 - protein, 18 aa, synthetic construct
KTINGSGSPHSKRFRQQT

SEQ ID NO: 4185 - protein, 18 aa, synthetic construct
KTINGSGSPHSKRPYQQT

SEQ ID NO: 4186 - protein, 18 aa, synthetic construct
KTINGSGSPHSKRRMQQT

SEQ ID NO: 4187 - protein, 18 aa, synthetic construct
KTINGSGSPHSKRSKQQT

SEQ ID NO: 4188 - protein, 18 aa, synthetic construct
KTINGSGSPHSKRSRQQT

SEQ ID NO: 4189 - protein, 18 aa, synthetic construct
KTINGSGSPHSKRTMQQT

SEQ ID NO: 4190 - protein, 18 aa, synthetic construct
KTINGSGSPHSKRTRQQT

SEQ ID NO: 4191 - protein, 18 aa, synthetic construct
KTINGSGSPHSKRVRQQT

SEQ ID NO: 4192 - protein, 18 aa, synthetic construct
KTINGSGSPHSKRYIQQT

SEQ ID NO: 4193 - protein, 18 aa, synthetic construct
KTINGSGSPHSKRYNQQT

SEQ ID NO: 4194 - protein, 18 aa, synthetic construct
KTINGSGSPHSKRYPQQT

SEQ ID NO: 4195 - protein, 18 aa, synthetic construct
KTINGSGSPHSKRYSQQT

SEQ ID NO: 4196 - protein, 18 aa, synthetic construct
KTINGSGSPHSKTCIQQT

SEQ ID NO: 4197 - protein, 18 aa, synthetic construct
KTINGSGSPHSKWLTQQT

SEQ ID NO: 4198 - protein, 18 aa, synthetic construct
KTINGSGSPHSKWVVQQT

SEQ ID NO: 4199 - protein, 18 aa, synthetic construct
KTINGSGSPHSKYRLQQT

SEQ ID NO: 4200 - protein, 18 aa, synthetic construct
KTINGSGSPHSKYSKQQT

SEQ ID NO: 4201 - protein, 18 aa, synthetic construct
KTINGSGSPHSKYSRQQT

SEQ ID NO: 4202 - protein, 18 aa, synthetic construct
KTINGSGSPHSLKRNQQT

SEQ ID NO: 4203 - protein, 18 aa, synthetic construct
KTINGSGSPHSLWFNQQT

SEQ ID NO: 4204 - protein, 18 aa, synthetic construct
KTINGSGSPHSLWPNQQT

SEQ ID NO: 4205 - protein, 18 aa, synthetic construct
KTINGSGSPHSLWTNQQT

SEQ ID NO: 4206 - protein, 18 aa, synthetic construct
KTINGSGSPHSMRRNQQT

SEQ ID NO: 4207 - protein, 18 aa, synthetic construct
KTINGSGSPHSPCLNQQT

SEQ ID NO: 4208 - protein, 18 aa, synthetic construct
KTINGSGSPHSQWQNQQT

SEQ ID NO: 4209 - protein, 18 aa, synthetic construct
KTINGSGSPHSRCANQQT

SEQ ID NO: 4210 - protein, 18 aa, synthetic construct
KTINGSGSPHSRIRNQQT

SEQ ID NO: 4211 - protein, 18 aa, synthetic construct
KTINGSGSPHSRKSNQQT

SEQ ID NO: 4212 - protein, 18 aa, synthetic construct
KTINGSGSPHSRLWNQQT

SEQ ID NO: 4213 - protein, 18 aa, synthetic construct
KTINGSGSPHSRRFNQQT

SEQ ID NO: 4214 - protein, 18 aa, synthetic construct
KTINGSGSPHSRRPNQQT

SEQ ID NO: 4215 - protein, 18 aa, synthetic construct
KTINGSGSPHSRSCNQQT

SEQ ID NO: 4216 - protein, 18 aa, synthetic construct
KTINGSGSPHSRSKNQQT

SEQ ID NO: 4217 - protein, 18 aa, synthetic construct
KTINGSGSPHSRTKNQQT

SEQ ID NO: 4218 - protein, 18 aa, synthetic construct
KTINGSGSPHSRWLNQQT

SEQ ID NO: 4219 - protein, 18 aa, synthetic construct
KTINGSGSPHSSVCNQQT

SEQ ID NO: 4220 - protein, 18 aa, synthetic construct
KTINGSGSPHSSWRNQQT

SEQ ID NO: 4221 - protein, 18 aa, synthetic construct
KTINGSGSPHSVCQNQQT

SEQ ID NO: 4222 - protein, 18 aa, synthetic construct
KTINGSGSPHSVLCNQQT

SEQ ID NO: 4223 - protein, 18 aa, synthetic construct
KTINGSGSPHSVRRNQQT

SEQ ID NO: 4224 - protein, 18 aa, synthetic construct
KTINGSGSPHSVSCNQQT

SEQ ID NO: 4225 - protein, 18 aa, synthetic construct
KTINGSGSPHSWALNQQT

SEQ ID NO: 4226 - protein, 18 aa, synthetic construct
KTINGSGSPHSWITNQQT

SEQ ID NO: 4227 - protein, 18 aa, synthetic construct
KTINGSGSPHSWPMNQQT

SEQ ID NO: 4228 - protein, 18 aa, synthetic construct
KTINGSGSPHSWRSNQQT

SEQ ID NO: 4229 - protein, 18 aa, synthetic construct
KTINGSGSPHSYFLNQQT

SEQ ID NO: 4230 - protein, 18 aa, synthetic construct
KTINGSGSPHSYTYNQQT

SEQ ID NO: 4231 - protein, 18 aa, synthetic construct
KTINGSGSPHSYWQNQQT

SEQ ID NO: 4232 - protein, 18 aa, synthetic construct
KTINGSGSPHTLCQNQQT

SEQ ID NO: 4233 - protein, 18 aa, synthetic construct
KTINGSGSPHWLRQNQQT

SEQ ID NO: 4234 - protein, 18 aa, synthetic construct
KTINGSGSPHWPSQNQQT

SEQ ID NO: 4235 - protein, 18 aa, synthetic construct
KTINGSGSPHYLRQNQQT

SEQ ID NO: 4236 - protein, 18 aa, synthetic construct
KTINGSGSPHYTRQNQQT

SEQ ID NO: 4237 - protein, 18 aa, synthetic construct
KTINGSLSPHLWAQNQQT

SEQ ID NO: 4238 - protein, 18 aa, synthetic construct
KTINGSPSPHCQAQNQQT

SEQ ID NO: 4239 - protein, 18 aa, synthetic construct
KTINGSRSPHLCAQNQQT

SEQ ID NO: 4240 - protein, 18 aa, synthetic construct
KTINGSRSPHWRAQNQQT

SEQ ID NO: 4241 - protein, 18 aa, synthetic construct
KTINGSVSPHWLAQNQQT

SEQ ID NO: 4242 - protein, 18 aa, synthetic construct
KTINGTFSPHRKAQNQQT

SEQ ID NO: 4243 - protein, 18 aa, synthetic construct
KTINGWTSPHRKAQNQQT

SEQ ID NO: 4244 - protein, 18 aa, synthetic construct
KTINRGISPHSKAQNQQT

SEQ ID NO: 4245 - protein, 18 aa, synthetic construct
KTINTVRSPHSKAQNQQT

SEQ ID NO: 4246 - protein, 18 aa, synthetic construct
KTKLRSGSPHSKAQNQQT

SEQ ID NO: 4247 - protein, 18 aa, synthetic construct
KTRLRSGSPHSKAQNQQT

SEQ ID NO: 4248 - protein, 18 aa, synthetic construct
KWLLGSGSPHSKAQNQQT

SEQ ID NO: 4249 - protein, 18 aa, synthetic construct
KWSQGSGSPHSKAQNQQT

SEQ ID NO: 4250 - protein, 18 aa, synthetic construct
KWYLGSGSPHSKAQNQQT

SEQ ID NO: 4251 - protein, 18 aa, synthetic construct
KYHSGSGSPHSKAQNQQT

SEQ ID NO: 4252 - protein, 18 aa, synthetic construct
KYLPGSGSPHSKAQNQQT

SEQ ID NO: 4253 - protein, 18 aa, synthetic construct
KAINGGGSPHSKTQNQQT

SEQ ID NO: 4254 - protein, 18 aa, synthetic construct
KAINGHDSPHKRSPNQQT

SEQ ID NO: 4255 - protein, 18 aa, synthetic construct
KAINGHDSPHKSFSPQQT

SEQ ID NO: 4256 - protein, 18 aa, synthetic construct
KAINGHDSPHKSGENQQP

SEQ ID NO: 4257 - protein, 18 aa, synthetic construct
KAINGHDSPHKSGQLART

SEQ ID NO: 4258 - protein, 18 aa, synthetic construct
KAINGHDSPHKSGQNAFL

SEQ ID NO: 4259 - protein, 18 aa, synthetic construct
KAINGHDSPHKSGQNAYT

SEQ ID NO: 4260 - protein, 18 aa, synthetic construct
KAINGHDSPHKSGQNFAS

SEQ ID NO: 4261 - protein, 18 aa, synthetic construct
KAINGHDSPHKSGQNLAS

SEQ ID NO: 4262 - protein, 18 aa, synthetic construct
KAINGHDSPHKSGQNLGS

SEQ ID NO: 4263 - protein, 18 aa, synthetic construct
KAINGHDSPHKSGQNLKF

SEQ ID NO: 4264 - protein, 18 aa, synthetic construct
KAINGHDSPHKSGQNLLK

SEQ ID NO: 4265 - protein, 18 aa, synthetic construct
KAINGHDSPHKSGQNLSR

SEQ ID NO: 4266 - protein, 18 aa, synthetic construct
KAINGHDSPHKSGQNLSS

SEQ ID NO: 4267 - protein, 18 aa, synthetic construct
KAINGHDSPHKSGQNSLG

SEQ ID NO: 4268 - protein, 18 aa, synthetic construct
KAINGHDSPHKSGQNTLQ

SEQ ID NO: 4269 - protein, 18 aa, synthetic construct
KAINGHDSPHKSGQNTSL

SEQ ID NO: 4270 - protein, 18 aa, synthetic construct
KAINGHDSPHKSGQRLGT

SEQ ID NO: 4271 - protein, 18 aa, synthetic construct
KAINGHDSPHKSGQRNYT

SEQ ID NO: 4272 - protein, 18 aa, synthetic construct
KAINGHDSPHKSGQRPST

SEQ ID NO: 4273 - protein, 18 aa, synthetic construct
KAINGHDSPHKSGQRPVT

SEQ ID NO: 4274 - protein, 18 aa, synthetic construct
KAINGHDSPHKSGQVPST

SEQ ID NO: 4275 - protein, 18 aa, synthetic construct
KAINGHDSPHKSLSNQQT

SEQ ID NO: 4276 - protein, 18 aa, synthetic construct
KAINGHDSPHKSVLSQQT

SEQ ID NO: 4277 - protein, 18 aa, synthetic construct
KAINGHDSPHKTLQNQQT

SEQ ID NO: 4278 - protein, 18 aa, synthetic construct
KAINGHNSPHSKAQNQQT

SEQ ID NO: 4279 - protein, 18 aa, synthetic construct
KAINGLDSPHSKAQNQQT

SEQ ID NO: 4280 - protein, 18 aa, synthetic construct
KAINGSGSPHKSGQNQQT

SEQ ID NO: 4281 - protein, 18 aa, synthetic construct
KAINGSGSPHSKAQGQQT

SEQ ID NO: 4282 - protein, 18 aa, synthetic construct
KAINGSGSPHSKAQLSGT

SEQ ID NO: 4283 - protein, 18 aa, synthetic construct
KAINGSGSPHSKAQNGSL

SEQ ID NO: 4284 - protein, 18 aa, synthetic construct
KAINGSGSPHSKAQNSLL

SEQ ID NO: 4285 - protein, 18 aa, synthetic construct
KAINGSGSPHSKAVGLQT

SEQ ID NO: 4286 - protein, 18 aa, synthetic construct
KAINGSGSPHSKSLLQQT

SEQ ID NO: 4287 - protein, 18 aa, synthetic construct
KAINGSGSPHSKSLPQQT

SEQ ID NO: 4288 - protein, 18 aa, synthetic construct
KAINGSGSPHSKSTFQQT

SEQ ID NO: 4289 - protein, 18 aa, synthetic construct
KAITGHDSPHSKAQNQQT

SEQ ID NO: 4290 - protein, 18 aa, synthetic construct
KDVMGSGSPHSKAQNQQT

SEQ ID NO: 4291 - protein, 18 aa, synthetic construct
KEIVGSGSPHSKAQNQQT

SEQ ID NO: 4292 - protein, 18 aa, synthetic construct
KEIYGSGSPHSKAQNQQT

SEQ ID NO: 4293 - protein, 18 aa, synthetic construct
KELSGSGSPHSKAQNQQT

SEQ ID NO: 4294 - protein, 18 aa, synthetic construct
KETIGSGSPHSKAQNQQT

SEQ ID NO: 4295 - protein, 18 aa, synthetic construct
KEVLGSGSPHSKAQNQQT

SEQ ID NO: 4296 - protein, 18 aa, synthetic construct
KFALGHDSPHKSGQKQQT

SEQ ID NO: 4297 - protein, 18 aa, synthetic construct
KIINGHDSPHKSGQNLVL

SEQ ID NO: 4298 - protein, 18 aa, synthetic construct
KIINGHDSPHKSGQRNYT

SEQ ID NO: 4299 - protein, 18 aa, synthetic construct
KIINGHDSPHSKAQNQQT

SEQ ID NO: 4300 - protein, 18 aa, synthetic construct
KLNPGHDSPHKSGQTQQT

SEQ ID NO: 4301 - protein, 18 aa, synthetic construct
KLNRGHDSPHKSGQNQQS

SEQ ID NO: 4302 - protein, 18 aa, synthetic construct
KLSSGHDSPHKSGQNQQN

SEQ ID NO: 4303 - protein, 18 aa, synthetic construct
KNINGHDSPHSKAQNQQT

SEQ ID NO: 4304 - protein, 18 aa, synthetic construct
KNNDGSGSPHSKAQNQQT

SEQ ID NO: 4305 - protein, 18 aa, synthetic construct
KNVMGSGSPHSKAQNQQT

SEQ ID NO: 4306 - protein, 18 aa, synthetic construct
KPINGHDSPHKSGQNKLS

SEQ ID NO: 4307 - protein, 18 aa, synthetic construct
KPINGHDSPHKSGQNLSS

SEQ ID NO: 4308 - protein, 18 aa, synthetic construct
KPINGHDSPHSKAQNQQT

SEQ ID NO: 4309 - protein, 18 aa, synthetic construct
KRINGHDSPHSKAQNQQT

SEQ ID NO: 4310 - protein, 18 aa, synthetic construct
KSCSGHDSPHKSGQNQQS

SEQ ID NO: 4311 - protein, 18 aa, synthetic construct
KSINGHDSPHKSGQNLAS

SEQ ID NO: 4312 - protein, 18 aa, synthetic construct
KSINGHDSPHKSGQNLFL

SEQ ID NO: 4313 - protein, 18 aa, synthetic construct
KSINGHDSPHKSGQNLLM

SEQ ID NO: 4314 - protein, 18 aa, synthetic construct
KSINGHDSPHKSGQNLLQ

SEQ ID NO: 4315 - protein, 18 aa, synthetic construct
KSINGHDSPHKSGQNSLG

SEQ ID NO: 4316 - protein, 18 aa, synthetic construct
KSINGHDSPHKSGQNTLQ

SEQ ID NO: 4317 - protein, 18 aa, synthetic construct
KSINGHDSPHKSSSNQQT

SEQ ID NO: 4318 - protein, 18 aa, synthetic construct
KSINGHDSPHKYKLNQQT

SEQ ID NO: 4319 - protein, 18 aa, synthetic construct
KSINGSGSPHKSGQKQQT

SEQ ID NO: 4320 - protein, 18 aa, synthetic construct
KSINGSGSPHKSGQNQQT

SEQ ID NO: 4321 - protein, 18 aa, synthetic construct
KSINGSGSPHSKAQGLST

SEQ ID NO: 4322 - protein, 18 aa, synthetic construct
KSINGSGSPHSKAQLLGT

SEQ ID NO: 4323 - protein, 18 aa, synthetic construct
KSINGSGSPHSKTSWQQT

SEQ ID NO: 4324 - protein, 18 aa, synthetic construct
KSMNGHDSPHSKAQNQQT

SEQ ID NO: 4325 - protein, 18 aa, synthetic construct
KSTLGSGSPHSKAQNQHT

SEQ ID NO: 4326 - protein, 18 aa, synthetic construct
KSTLGSGSPHSKAQNQQN

SEQ ID NO: 4327 - protein, 18 aa, synthetic construct
KSTVGSGSPHSKAQTQQT

SEQ ID NO: 4328 - protein, 18 aa, synthetic construct
KTCKESGSPHSKAQNQQT

SEQ ID NO: 4329 - protein, 18 aa, synthetic construct
KTCKGSGSPHSKAQNQQT

SEQ ID NO: 4330 - protein, 18 aa, synthetic construct
KTCKSSGSPHSKAQNQQT

SEQ ID NO: 4331 - protein, 18 aa, synthetic construct
KTDMGSGSPHSKAQNQQT

SEQ ID NO: 4332 - protein, 18 aa, synthetic construct
KTDNGIGSPHSKAQNQQT

SEQ ID NO: 4333 - protein, 18 aa, synthetic construct
KTEGGSGSPHSKAQNQQT

SEQ ID NO: 4334 - protein, 18 aa, synthetic construct
KTEHHSGSPHSKAQNQQT

SEQ ID NO: 4335 - protein, 18 aa, synthetic construct
KTEKDSGSPHSKAQNQQT

SEQ ID NO: 4336 - protein, 18 aa, synthetic construct
KTELGHDSPHKRGQNQQT

SEQ ID NO: 4337 - protein, 18 aa, synthetic construct
KTESVSGSPHSKAQNQQT

SEQ ID NO: 4338 - protein, 18 aa, synthetic construct
KTETNSGSPHSKAQNQQT

SEQ ID NO: 4339 - protein, 18 aa, synthetic construct
KTETYSGSPHSKAQNQQT

SEQ ID NO: 4340 - protein, 18 aa, synthetic construct
KTEWLSGSPHSKAQNQQT

SEQ ID NO: 4341 - protein, 18 aa, synthetic construct
KTFNGSGSPHKSGQNQQT

SEQ ID NO: 4342 - protein, 18 aa, synthetic construct
KTGLRHDSPHKSGQKQQT

SEQ ID NO: 4343 - protein, 18 aa, synthetic construct
KTGLRHDSPHKSGQNQQS

SEQ ID NO: 4344 - protein, 18 aa, synthetic construct
KTGVTHDSPHKSGQKQQT

SEQ ID NO: 4345 - protein, 18 aa, synthetic construct
KTIDGHESPHSKAQNQQT

SEQ ID NO: 4346 - protein, 18 aa, synthetic construct
KTIEGHDSPHKSGQTQQT

SEQ ID NO: 4347 - protein, 18 aa, synthetic construct
KTIHGHDSPHSKAQNQQT

SEQ ID NO: 4348 - protein, 18 aa, synthetic construct
KTIHGHESPHSKAQNQQT

SEQ ID NO: 4349 - protein, 18 aa, synthetic construct
KTIIGHDSPHKSGQNRSS

SEQ ID NO: 4350 - protein, 18 aa, synthetic construct
KTIIGHDSPHKSGQRLGT

SEQ ID NO: 4351 - protein, 18 aa, synthetic construct
KTIIGSGSPHKSGQNQQT

SEQ ID NO: 4352 - protein, 18 aa, synthetic construct
KTIKGHDSPHKSGQNMLF

SEQ ID NO: 4353 - protein, 18 aa, synthetic construct
KTILGSGSPHSKAQNLQT

SEQ ID NO: 4354 - DNA, 54 bp, synthetic construct
  source 1..54: mol_type = other DNA
gtgctgggcggggggcggcgggccctcccgcagaacaccatgcgctcttcggaa

SEQ ID NO: 4355 - DNA, 100 bp, synthetic construct
  source 1..100: mol_type = other DNA
gaagcaaagaaggggcagagggagcccgtgagctgagtgggccagggactgggagaaggagtgaggaggcagggccggcatgcctctgctgctggccaga

SEQ ID NO: 4356 - protein, 18 aa, synthetic construct
KTINGHDSPHKAGQSQQT

SEQ ID NO: 4357 - protein, 18 aa, synthetic construct
KTINGHDSPHKRGQNVPS

SEQ ID NO: 4358 - protein, 18 aa, synthetic construct
KTINGHDSPHKRGRSYQT

SEQ ID NO: 4359 - protein, 18 aa, synthetic construct
KTINGHDSPHKTGQNPPT

SEQ ID NO: 4360 - protein, 18 aa, synthetic construct
KTINGHDSPHSKAENQQT

SEQ ID NO: 4361 - protein, 18 aa, synthetic construct
KTINGHDSPHSKALSLQT

SEQ ID NO: 4362 - DNA, 10 bp, synthetic construct
  source 1..10: mol_type = other DNA
tgtgacctgg

SEQ ID NO: 4363 - DNA, 10 bp, synthetic construct
  source 1..10: mol_type = other DNA
tgtgatttgg

SEQ ID NO: 4364 - DNA, 10 bp, synthetic construct
  source 1..10: mol_type = other DNA
tataatttgg

SEQ ID NO: 4365 - DNA, 11 bp, synthetic construct
  source 1..11: mol_type = other DNA
cctgacccagt

SEQ ID NO: 4366 - DNA, 18 bp, synthetic construct
  source 1..18: mol_type = other DNA
gtctgcacctgtcactag

SEQ ID NO: 4367 - DNA, 10 bp, synthetic construct
  source 1..10: mol_type = other DNA
gtgacccaag

SEQ ID NO: 4368 - DNA, 15 bp, synthetic construct
  source 1..15: mol_type = other DNA
gtggccactgagaag

SEQ ID NO: 4369 - DNA, 10 bp, synthetic construct
  source 1..10: mol_type = other DNA
gtgacccaat

SEQ ID NO: 4370 - DNA, 10 bp, synthetic construct
  source 1..10: mol_type = other DNA
gtgacccaac

SEQ ID NO: 4371 - DNA, 15 bp, synthetic construct
  source 1..15: mol_type = other DNA
gtggccactgagaaa

SEQ ID NO: 4372 - DNA, 50 bp, synthetic construct
  source 1..50: mol_type = other DNA
agtgtatgatgcctgttactagcattcacatggaacaaattgctgccgtg

SEQ ID NO: 4373 - DNA, 52 bp, synthetic construct
  source 1..52: mol_type = other DNA
ctgaggagcgccttgacagcagccatgggagggccgccccctacctcagtga

SEQ ID NO: 4374 - DNA, 52 bp, synthetic construct
  source 1..52: mol_type = other DNA
ctgtggagcgccttgacagcagccatgggagggccgccccctacctcagtga

SEQ ID NO: 4375 - DNA, 100 bp, synthetic construct
  source 1..100: mol_type = other DNA
tggccgtgtagtgctacccagcgctggctgcctcctcagcattgcaattcctctcccatctgggcaccagtcagctaccctggtgggaatctgggtagcc

SEQ ID NO: 4376 - DNA, 99 bp, synthetic construct
  source 1..99: mol_type = other DNA
ggccgtgtagtgctacccagcgctggctgcctcctcagcattgcaattcctctcccatctgggcaccagtcagctaccctggtgggaatctgggtagcc

SEQ ID NO: 4377 - DNA, 54 bp, synthetic construct
  source 1..54: mol_type = other DNA
tcctgaggagcgccttgacagcagccatgggagggccgccccctacctcagtga

SEQ ID NO: 4378 - DNA, 35 bp, synthetic construct
  source 1..35: mol_type = other DNA
ctgaggagcgccttgacagcagccatgggagggcc

SEQ ID NO: 4379 - DNA, 52 bp, synthetic construct
  source 1..52: mol_type = other DNA
ctgcggagcgccttgacagcagccatgggagggccgccccctacctcagtga

SEQ ID NO: 4380 - DNA, 158 bp, synthetic construct
  source 1..158: mol_type = other DNA
gtgctgggcggggggcggcgggccctcccgcagaacaccatgcgctcttcggaagactggaagcgatgacaaccctgtgacctggtttgtcatcgcttccagtcttctgaggagcgccttgacagcagccatgggagggccgccccctacctcagtga

SEQ ID NO: 4381 - DNA, 158 bp, synthetic construct
  source 1..158: mol_type = other DNA
gtgctgggcggggggcggcgggccctcccgcagaacaccatgcgctcttcggaacttccgcgagaacgccaaccctgtgacctggtttggcgttctcgcggaagttctgaggagcgccttgacagcagccatgggagggccgccccctacctcagtga

SEQ ID NO: 4382 - DNA, 158 bp, synthetic construct
  source 1..158: mol_type = other DNA
gtgctgggcggggggcggcgggccctcccgcagaacaccatgcgctcttcggaagcatcgacatggtagactccctgtgacctggtagtctaccatgtcgatgcttctgaggagcgccttgacagcagccatgggagggccgccccctacctcagtga

SEQ ID NO: 4383 - DNA, 158 bp, synthetic construct
  source 1..158: mol_type = other DNA
gtgctgggcggggggcggcgggccctcccgcagaacaccatgcgctcttcggaagctcctcgcagttcggttccctgtgacctggtaaccgaactgcgaggagcttctgaggagcgccttgacagcagccatgggagggccgccccctacctcagtga

SEQ ID NO: 4384 - DNA, 158 bp, synthetic construct
  source 1..158: mol_type = other DNA
gtgctgggcggggggcggcgggccctcccgcagaacaccatgcgctcttcggaaggctttggctcgggacttccctgtgacctggtaagtcccgagccaaagccttctgaggagcgccttgacagcagccatgggagggccgccccctacctcagtga

SEQ ID NO: 4385 - DNA, 158 bp, synthetic construct
  source 1..158: mol_type = other DNA
gtgctgggcggggggcggcgggccctcccgcagaacaccatgcgctcttcggaagactggaagcgatgacaaacctgtgacctggtttgtcatcgcttccagtcttctgaggagcgccttgacagcagccatgggagggccgccccctacctcagtga

SEQ ID NO: 4386 - DNA, 158 bp, synthetic construct
  source 1..158: mol_type = other DNA
gtgctgggcggggggcggcgggccctcccgcagaacaccatgcgctcttcggaacttccgcgagaacgccaaacctgtgacctggtttggcgttctcgcggaagttctgaggagcgccttgacagcagccatgggagggccgccccctacctcagtga

SEQ ID NO: 4387 - DNA, 158 bp, synthetic construct
  source 1..158: mol_type = other DNA
gtgctgggcggggggcggcgggccctcccgcagaacaccatgcgctcttcggaagcatcgacatggtagactacctgtgacctggtagtctaccatgtcgatgcttctgaggagcgccttgacagcagccatgggagggccgccccctacctcagtga

SEQ ID NO: 4388 - DNA, 158 bp, synthetic construct
  source 1..158: mol_type = other DNA
gtgctgggcggggggcggcgggccctcccgcagaacaccatgcgctcttcggaagctcctcgcagttcggttgcctgtgacctggtaaccgaactgcgaggagcttctgaggagcgccttgacagcagccatgggagggccgccccctacctcagtga

SEQ ID NO: 4389 - DNA, 158 bp, synthetic construct
  source 1..158: mol_type = other DNA
gtgctgggcggggggcggcgggccctcccgcagaacaccatgcgctcttcggaaggctttggctcgggacttacctgtgacctggtaagtcccgagccaaagccttctgaggagcgccttgacagcagccatgggagggccgccccctacctcagtga

SEQ ID NO: 4390 - DNA, 158 bp, synthetic construct
  source 1..158: mol_type = other DNA
gtgctgggcggggggcggcgggccctcccgcagaacaccatgcgctcttcggaagactggaagcgatgacaatcctgtgatttggtttgtcatcgcttccagtcttctgaggagcgccttgacagcagccatgggagggccgccccctacctcagtga

SEQ ID NO: 4391 - DNA, 158 bp, synthetic construct
  source 1..158: mol_type = other DNA
gtgctgggcggggggcggcgggccctcccgcagaacaccatgcgctcttcggaacttccgcgagaacgccaatcctgtgatttggtttggcgttctcgcggaagttctgaggagcgccttgacagcagccatgggagggccgccccctacctcagtga

SEQ ID NO: 4392 - DNA, 158 bp, synthetic construct
  source 1..158: mol_type = other DNA
gtgctgggcggggggcggcgggccctcccgcagaacaccatgcgctcttcggaagcatcgacatggtagacttcctgtgatttggtagtctaccatgtcgatgcttctgaggagcgccttgacagcagccatgggagggccgccccctacctcagtga

SEQ ID NO: 4393 - DNA, 158 bp, synthetic construct
  source 1..158: mol_type = other DNA
gtgctgggcggggggcggcgggccctcccgcagaacaccatgcgctcttcggaagctcctcgcagttcggtttcctgtgatttggtaaccgaactgcgaggagcttctgaggagcgccttgacagcagccatgggagggccgccccctacctcagtga

SEQ ID NO: 4394 - DNA, 158 bp, synthetic construct
  source 1..158: mol_type = other DNA
gtgctgggcggggggcggcgggccctcccgcagaacaccatgcgctcttcggaaggctttggctcgggactttcctgtgatttggtaagtcccgagccaaagccttctgaggagcgccttgacagcagccatgggagggccgccccctacctcagtga

SEQ ID NO: 4395 - DNA, 158 bp, synthetic construct
  source 1..158: mol_type = other DNA
gtgctgggcggggggcggcgggccctcccgcagaacaccatgcgctcttcggaagactggaagggatgacaaccctgtgacctggtttgtcatcgcttccagtcttctgtggagcgccttgacagcagccatgggagggccgccccctacctcagtga

SEQ ID NO: 4396 - DNA, 158 bp, synthetic construct
  source 1..158: mol_type = other DNA
gtgctgggcggggggcggcgggccctcccgcagaacaccatgcgctcttcggaacttccgcgacaacgccaaccctgtgacctggtttggcgttctcgcggaagttctgtggagcgccttgacagcagccatgggagggccgccccctacctcagtga

SEQ ID NO: 4397 - DNA, 158 bp, synthetic construct
  source 1..158: mol_type = other DNA
gtgctgggcggggggcggcgggccctcccgcagaacaccatgcgctcttcggaagcatcgacaaggtagactccctgtgacctggtagtctaccatgtcgatgcttctgtggagcgccttgacagcagccatgggagggccgccccctacctcagtga

SEQ ID NO: 4398 - DNA, 158 bp, synthetic construct
  source 1..158: mol_type = other DNA
gtgctgggcggggggcggcgggccctcccgcagaacaccatgcgctcttcggaagctcctcgctgttcggttccctgtgacctggtaaccgaactgcgaggagcttctgtggagcgccttgacagcagccatgggagggccgccccctacctcagtga

SEQ ID NO: 4399 - DNA, 158 bp, synthetic construct
  source 1..158: mol_type = other DNA
gtgctgggcggggggcggcgggccctcccgcagaacaccatgcgctcttcggaaggctttggcacgggacttccctgtgacctggtaagtcccgagccaaagccttctgtggagcgccttgacagcagccatgggagggccgccccctacctcagtga

SEQ ID NO: 4400 - DNA, 158 bp, synthetic construct
  source 1..158: mol_type = other DNA
gtgctgggcggggggcggcgggccctcccgcagaacaccatgcgctcttcggaagactggaagcgatgacaagcctgtgacctggtttgtcatcgcttccagtcttctgtggagcgccttgacagcagccatgggagggccgccccctacctcagtga

SEQ ID NO: 4401 - DNA, 158 bp, synthetic construct
  source 1..158: mol_type = other DNA
gtgctgggcggggggcggcgggccctcccgcagaacaccatgcgctcttcggaacttccgcgagaacgccaagcctgtgacctggtttggcgttctcgcggaagttctgtggagcgccttgacagcagccatgggagggccgccccctacctcagtga

SEQ ID NO: 4402 - DNA, 158 bp, synthetic construct
  source 1..158: mol_type = other DNA
gtgctgggcggggggcggcgggccctcccgcagaacaccatgcgctcttcggaagcatcgacatggtagactgcctgtgacctggtagtctaccatgtcgatgcttctgtggagcgccttgacagcagccatgggagggccgccccctacctcagtga

SEQ ID NO: 4403 - DNA, 158 bp, synthetic construct
  source 1..158: mol_type = other DNA
gtgctgggcggggggcggcgggccctcccgcagaacaccatgcgctcttcggaagctcctcgcagttcggttgcctgtgacctggtaaccgaactgcgaggagcttctgtggagcgccttgacagcagccatgggagggccgccccctacctcagtga

SEQ ID NO: 4404 - DNA, 158 bp, synthetic construct
  source 1..158: mol_type = other DNA
gtgctgggcggggggcggcgggccctcccgcagaacaccatgcgctcttcggaaggctttggctcgggacttgcctgtgacctggtaagtcccgagccaaagccttctgtggagcgccttgacagcagccatgggagggccgccccctacctcagtga

SEQ ID NO: 4405 - DNA, 260 bp, synthetic construct
  source 1..260: mol_type = other DNA
gaagcaaagaaggggcagagggagcccgtgagctgagtgggccagggactgggagaaggagtgaggaggcagggccggcatgcctctgctgctggccagagactggaagcgatgacaatctgtctgcacctgtcactagtttgtcatcgcttccagtctttggccgtgtagtgctacccagcgctggctgcctcctcagcattgcaattcctctcccatctgggcaccagtcagctaccctggtgggaatctgggtagcc

SEQ ID NO: 4406 - DNA, 260 bp, synthetic construct
  source 1..260: mol_type = other DNA
gaagcaaagaaggggcagagggagcccgtgagctgagtgggccagggactgggagaaggagtgaggaggcagggccggcatgcctctgctgctggccagacttccgcgagaacgccaatctgtctgcacctgtcactagtttggcgttctcgcggaagtttggccgtgtagtgctacccagcgctggctgcctcctcagcattgcaattcctctcccatctgggcaccagtcagctaccctggtgggaatctgggtagcc

SEQ ID NO: 4407 - DNA, 260 bp, synthetic construct
  source 1..260: mol_type = other DNA
gaagcaaagaaggggcagagggagcccgtgagctgagtgggccagggactgggagaaggagtgaggaggcagggccggcatgcctctgctgctggccagagcatcgacatggtagacttctgtctgcacctgtcactagtagtctaccatgtcgatgctttggccgtgtagtgctacccagcgctggctgcctcctcagcattgcaattcctctcccatctgggcaccagtcagctaccctggtgggaatctgggtagcc

SEQ ID NO: 4408 - DNA, 260 bp, synthetic construct
  source 1..260: mol_type = other DNA
gaagcaaagaaggggcagagggagcccgtgagctgagtgggccagggactgggagaaggagtgaggaggcagggccggcatgcctctgctgctggccagagctcctcgcagttcggtttctgtctgcacctgtcactagtaaccgaactgcgaggagctttggccgtgtagtgctacccagcgctggctgcctcctcagcattgcaattcctctcccatctgggcaccagtcagctaccctggtgggaatctgggtagcc

SEQ ID NO: 4409 - DNA, 260 bp, synthetic construct
  source 1..260: mol_type = other DNA
gaagcaaagaaggggcagagggagcccgtgagctgagtgggccagggactgggagaaggagtgaggaggcagggccggcatgcctctgctgctggccagaggctttggctcgggactttctgtctgcacctgtcactagtaagtcccgagccaaagcctttggccgtgtagtgctacccagcgctggctgcctcctcagcattgcaattcctctcccatctgggcaccagtcagctaccctggtgggaatctgggtagcc

SEQ ID NO: 4410 - DNA, 19 bp, synthetic construct
  source 1..19: mol_type = other DNA
gactggaagcgatgacaac

SEQ ID NO: 4411 - DNA, 19 bp, synthetic construct
  source 1..19: mol_type = other DNA
cttccgcgagaacgccaac

SEQ ID NO: 4412 - DNA, 19 bp, synthetic construct
  source 1..19: mol_type = other DNA
gcatcgacatggtagactc

SEQ ID NO: 4413 - DNA, 19 bp, synthetic construct
  source 1..19: mol_type = other DNA
gctcctcgcagttcggttc

SEQ ID NO: 4414 - DNA, 19 bp, synthetic construct
  source 1..19: mol_type = other DNA
ggctttggctcgggacttc

SEQ ID NO: 4415 - DNA, 19 bp, synthetic construct
  source 1..19: mol_type = other DNA
gactggaagcgatgacaaa

SEQ ID NO: 4416 - DNA, 19 bp, synthetic construct
  source 1..19: mol_type = other DNA
cttccgcgagaacgccaaa

SEQ ID NO: 4417 - DNA, 19 bp, synthetic construct
  source 1..19: mol_type = other DNA
gcatcgacatggtagacta

SEQ ID NO: 4418 - DNA, 19 bp, synthetic construct
  source 1..19: mol_type = other DNA
gctcctcgcagttcggttg

SEQ ID NO: 4419 - DNA, 19 bp, synthetic construct
  source 1..19: mol_type = other DNA
ggctttggctcgggactta

SEQ ID NO: 4420 - DNA, 19 bp, synthetic construct
  source 1..19: mol_type = other DNA
gactggaagcgatgacaat

SEQ ID NO: 4421 - DNA, 19 bp, synthetic construct
  source 1..19: mol_type = other DNA
cttccgcgagaacgccaat

SEQ ID NO: 4422 - DNA, 19 bp, synthetic construct
  source 1..19: mol_type = other DNA
gcatcgacatggtagactt

SEQ ID NO: 4423 - DNA, 19 bp, synthetic construct
  source 1..19: mol_type = other DNA
gctcctcgcagttcggttt

SEQ ID NO: 4424 - DNA, 19 bp, synthetic construct
  source 1..19: mol_type = other DNA
ggctttggctcgggacttt

SEQ ID NO: 4425 - DNA, 19 bp, synthetic construct
  source 1..19: mol_type = other DNA
gactggaagggatgacaac

SEQ ID NO: 4426 - DNA, 19 bp, synthetic construct
  source 1..19: mol_type = other DNA
cttccgcgacaacgccaac

SEQ ID NO: 4427 - DNA, 19 bp, synthetic construct
  source 1..19: mol_type = other DNA
gcatcgacaaggtagactc

SEQ ID NO: 4428 - DNA, 19 bp, synthetic construct
  source 1..19: mol_type = other DNA
gctcctcgctgttcggttc

SEQ ID NO: 4429 - DNA, 19 bp, synthetic construct
  source 1..19: mol_type = other DNA
ggctttggcacgggacttc

SEQ ID NO: 4430 - DNA, 19 bp, synthetic construct
  source 1..19: mol_type = other DNA
gactggaagcgatgacaag

SEQ ID NO: 4431 - DNA, 19 bp, synthetic construct
  source 1..19: mol_type = other DNA
cttccgcgagaacgccaag

SEQ ID NO: 4432 - DNA, 19 bp, synthetic construct
  source 1..19: mol_type = other DNA
gcatcgacatggtagactg

SEQ ID NO: 4433 - DNA, 19 bp, synthetic construct
  source 1..19: mol_type = other DNA
ggctttggctcgggacttg

SEQ ID NO: 4434 - DNA, 19 bp, synthetic construct
  source 1..19: mol_type = other DNA
tttgtcatcgcttccagtc

SEQ ID NO: 4435 - DNA, 19 bp, synthetic construct
  source 1..19: mol_type = other DNA
tttggcgttctcgcggaag

SEQ ID NO: 4436 - DNA, 19 bp, synthetic construct
  source 1..19: mol_type = other DNA
tagtctaccatgtcgatgc

SEQ ID NO: 4437 - DNA, 19 bp, synthetic construct
  source 1..19: mol_type = other DNA
taaccgaactgcgaggagc

SEQ ID NO: 4438 - DNA, 19 bp, synthetic construct
  source 1..19: mol_type = other DNA
taagtcccgagccaaagcc

SEQ ID NO: 4439 - protein, 18 aa, synthetic construct
KTINGSGSPHSKAQRPCT

SEQ ID NO: 4440 - protein, 18 aa, synthetic construct
KTINGSGSPHSKAQRQAT

SEQ ID NO: 4441 - protein, 18 aa, synthetic construct
KTINGSGSPHSKAQRQPT

SEQ ID NO: 4442 - protein, 18 aa, synthetic construct
KTINGSGSPHSKAQTKLT

SEQ ID NO: 4443 - protein, 18 aa, synthetic construct
KTINGSGSPHSKAQTTHT

SEQ ID NO: 4444 - protein, 18 aa, synthetic construct
KTINGSGSPHSKAQVQRT

SEQ ID NO: 4445 - protein, 18 aa, synthetic construct
KTINGSGSPHSKAQVVRT

SEQ ID NO: 4446 - protein, 18 aa, synthetic construct
KTINGSGSPHSKAQWPNT

SEQ ID NO: 4447 - protein, 18 aa, synthetic construct
KTINGSGSPHSKAQYPST

SEQ ID NO: 4448 - protein, 18 aa, synthetic construct
KTINGSGSPHSKARALQT

SEQ ID NO: 4449 - protein, 18 aa, synthetic construct
KTINGSGSPHSKARDQHT

SEQ ID NO: 4450 - protein, 18 aa, synthetic construct
KTINGSGSPHSKARFQQT

SEQ ID NO: 4451 - protein, 18 aa, synthetic construct
KTINGSGSPHSKARRTQT

SEQ ID NO: 4452 - protein, 18 aa, synthetic construct
KTINGSGSPHSKARSLQT

SEQ ID NO: 4453 - protein, 18 aa, synthetic construct
KTINGSGSPHSKARVIQT

SEQ ID NO: 4454 - protein, 18 aa, synthetic construct
KTINGSGSPHSKAWYLQT

SEQ ID NO: 4455 - protein, 18 aa, synthetic construct
KTINGSGSPHSKGGGQQT

SEQ ID NO: 4456 - protein, 18 aa, synthetic construct
KTINGSGSPHSKGSRQQT

SEQ ID NO: 4457 - protein, 18 aa, synthetic construct
KTINGSGSPHSKLQRQQT

SEQ ID NO: 4458 - protein, 18 aa, synthetic construct
KTINGSGSPHSKMLRQQT

SEQ ID NO: 4459 - protein, 18 aa, synthetic construct
KTINGSGSPHSKSSIKQT

SEQ ID NO: 4460 - protein, 18 aa, synthetic construct
KTINGSGSPHSKVRFQQT

SEQ ID NO: 4461 - protein, 18 aa, synthetic construct
KTINGSGSPHSVVWNQQT

SEQ ID NO: 4462 - protein, 18 aa, synthetic construct
KTINGSTSPHKLAQNQQP

SEQ ID NO: 4463 - protein, 18 aa, synthetic construct
KTINRHDSPHKSGQRPST

SEQ ID NO: 4464 - protein, 18 aa, synthetic construct
KTINRIMSPHSKAQNQQT

SEQ ID NO: 4465 - protein, 18 aa, synthetic construct
KTINTARSPHSKAQNQQT

SEQ ID NO: 4466 - protein, 18 aa, synthetic construct
KTISGHDSPHSKAQNQQT

SEQ ID NO: 4467 - protein, 18 aa, synthetic construct
KTISGSGSPHKSGQNQQT

SEQ ID NO: 4468 - protein, 18 aa, synthetic construct
KTITGHDSPHKSGQRLGT

SEQ ID NO: 4469 - protein, 18 aa, synthetic construct
KTITGSGSPHKSGQNQQT

SEQ ID NO: 4470 - protein, 18 aa, synthetic construct
KTIYGHDSPHKSGQRLGT

SEQ ID NO: 4471 - DNA, 380 bp, synthetic construct
  source 1..380: mol_type = other DNA
gacattgattattgactagttattaatagtaatcaattacggggtcattagttcatagcccatatatggagttccgcgttacataacttacggtaaatggcccgcctggctgaccgcccaacgacccccgcccattgacgtcaataatgacgtatgttcccatagtaacgccaatagggactttccattgacgtcaatgggtggagtatttacggtaaactgcccacttggcagtacatcaagtgtatcatatgccaagtacgccccctattgacgtcaatgacggtaaatggcccgcctggcattatgcccagtacatgaccttatgggactttcctacttggcagtacatctacgtattagtcatcgctattaccatg

SEQ ID NO: 4472 - DNA, 382 bp, synthetic construct
  source 1..382: mol_type = other DNA
cgcgtcgacattgattattgactagttattaatagtaatcaattacggggtcattagttcatagcccatatatggagttccgcgttacataacttacggtaaatggcccgcctggctgaccgcccaacgacccccgcccattgacgtcaataatgacgtatgttcccatagtaacgccaatagggactttccattgacgtcaatgggtggagtatttacggtaaactgcccacttggcagtacatcaagtgtatcatatgccaagtacgccccctattgacgtcaatgacggtaaatggcccgcctggcattatgcccagtacatgaccttatgggactttcctacttggcagtacatctacgtattagtcatcgctattac

SEQ ID NO: 4473 - DNA, 654 bp, synthetic construct
  source 1..654: mol_type = other DNA
cgacattgattattgactagttattaatagtaatcaattacggggtcattagttcatagcccatatatggagttccgcgttacataacttacggtaaatggcccgcctggctgaccgcccaacgacccccgcccattgacgtcaataatgacgtatgttcccatagtaacgccaatagggactttccattgacgtcaatgggtggagtatttacggtaaactgcccacttggcagtacatcaagtgtatcatatgccaagtacgccccctattgacgtcaatgacggtaaatggcccgcctggcattatgcccagtacatgaccttatgggactttcctacttggcagtacatctacgtattagtcatcgctattaccatgtcgaggccacgttctgcttcactctccccatctcccccccctccccacccccaattttgtatttatttattttttaattattttgtgcagcgatgggggcggggggggggggcgcgcgccaggcggggcggggcggggcgaggggcggggcggggcgaggcggagaggtgcggcggcagccaatcagagcggcgcgctccgaaagtttccttttatggcgaggcggcggcggcggcggccctataaaaagcgaagcgcgcggcgggcgggagc

SEQ ID NO: 4474 - DNA, 659 bp, synthetic construct
  source 1..659: mol_type = other DNA
cgcgtcgacattgattattgactagttattaatagtaatcaattacggggtcattagttcatagcccatatatggagttccgcgttacataacttacggtaaatggcccgcctggctgaccgcccaacgacccccgcccattgacgtcaataatgacgtatgttcccatagtaacgccaatagggactttccattgacgtcaatgggtggagtatttacggtaaactgcccacttggcagtacatcaagtgtatcatatgccaagtacgccccctattgacgtcaatgacggtaaatggcccgcctggcattatgcccagtacatgaccttatgggactttcctacttggcagtacatctacgtattagtcatcgctattaccatgtcgaggccacgttctgcttcactctccccatctcccccccctccccacccccaattttgtatttatttattttttaattattttgtgcagcgatgggggcggggggggggggcgcgcgccaggcggggcggggcggggcgaggggcggggcggggcgaggcggagaggtgcggcggcagccaatcagagcggcgcgctccgaaagtttccttttatggcgaggcggcggcggcggcggccctataaaaagcgaagcgcgcggcgggcgggagc

SEQ ID NO: 4475 - DNA, 566 bp, synthetic construct
  source 1..566: mol_type = other DNA
tcagatcgcctggagacgccatccacgctgttttgacctccatagaagacaccgggaccgatccagcctccgcggattcgaatcccggccgggaacggtgcattggaacgcggattccccgtgccaagagtgacgtaagtaccgcctatagagtctataggcccacaaaaaatgctttcttcttttaatatacttttttgtttatcttatttctaatactttccctaatctctttctttcagggcaataatgatacaatgtatcatgcctctttgcaccattctaaagaataacagtgataatttctgggttaaggcaatagcaatatttctgcatataaatatttctgcatataaattgtaactgatgtaagaggtttcatattgctaatagcagctacaatccagctaccattctgcttttattttatggttgggataaggctggattattctgagtccaagctaggcccttttgctaatcatgttcatacctcttatcttcctcccacagctcctgggcaacgtgctggtctgtgtgctggcccatcactttggcaaagaatt

SEQ ID NO: 4476 - DNA, 477 bp, synthetic construct
  source 1..477: mol_type = other DNA
gggtggcatccctgtgacccctccccagtgcctctcctggccctggaagttgccactccagtgcccaccagccttgtcctaataaaattaagttgcatcattttgtctgactaggtgtccttctataatattatggggtggaggggggtggtatggagcaaggggcaagttgggaagacaacctgtagggcctgcggggtctattgggaaccaagctggagtgcagtggcacaatcttggctcactgcaatctccgcctcctgggttcaagcgattctcctgcctcagcctcccgagttgttgggattccaggcatgcatgaccaggctcagctaatttttgtttttttggtagagacggggtttcaccatattggccaggctggtctccaactcctaatctcaggtgatctacccaccttggcctcccaaattgctgggattacaggcgtgaaccactgctcccttccctgtcctt

SEQ ID NO: 4477 - RNA, 19 nt, synthetic construct
  source 1..19: mol_type = other RNA
gctttggctcgggacttcc

SEQ ID NO: 4478 - protein, 18 aa, synthetic construct
KTVNGHDSPHKSGQRPST

SEQ ID NO: 4479 - protein, 18 aa, synthetic construct
KTVNGHDSPHKSGQTQQA

SEQ ID NO: 4480 - RNA, 19 nt, synthetic construct
  source 1..19: mol_type = other RNA
ggctttggctcgggacttc

SEQ ID NO: 4481 - RNA, 19 nt, synthetic construct
  source 1..19: mol_type = other RNA
ggctttggctcgggactta

SEQ ID NO: 4482 - RNA, 19 nt, synthetic construct
  source 1..19: mol_type = other RNA
ggctttggctcgggacttt

SEQ ID NO: 4483 - RNA, 19 nt, synthetic construct
  source 1..19: mol_type = other RNA
ggctttggcacgggacttc

SEQ ID NO: 4484 - RNA, 19 nt, synthetic construct
  source 1..19: mol_type = other RNA
ggctttggctcgggacttg

SEQ ID NO: 4485 - RNA, 19 nt, synthetic construct
  source 1..19: mol_type = other RNA
gcatcgacatggtagactc

SEQ ID NO: 4486 - RNA, 19 nt, synthetic construct
  source 1..19: mol_type = other RNA
gcatcgacatggtagacta

SEQ ID NO: 4487 - RNA, 19 nt, synthetic construct
  source 1..19: mol_type = other RNA
gcatcgacatggtagactt

SEQ ID NO: 4488 - RNA, 19 nt, synthetic construct
  source 1..19: mol_type = other RNA
gcatcgacaaggtagactc

SEQ ID NO: 4489 - RNA, 19 nt, synthetic construct
  source 1..19: mol_type = other RNA
gcatcgacatggtagactg

SEQ ID NO: 4490 - RNA, 19 nt, synthetic construct
  source 1..19: mol_type = other RNA
tgctcctcgcagttcggtc

SEQ ID NO: 4491 - RNA, 19 nt, synthetic construct
  source 1..19: mol_type = other RNA
cacccaagtcgccgtcttc

SEQ ID NO: 4492 - RNA, 19 nt, synthetic construct
  source 1..19: mol_type = other RNA
cctcgcagttcggttaatc

SEQ ID NO: 4493 - RNA, 19 nt, synthetic construct
  source 1..19: mol_type = other RNA
tcctcgcagttcggttaac

SEQ ID NO: 4494 - RNA, 19 nt, synthetic construct
  source 1..19: mol_type = other RNA
agctgaccttccgcgagac

SEQ ID NO: 4495 - RNA, 19 nt, synthetic construct
  source 1..19: mol_type = other RNA
gactggaagcgatgacaac

SEQ ID NO: 4496 - RNA, 19 nt, synthetic construct
  source 1..19: mol_type = other RNA
gactggaagcgatgacaaa

SEQ ID NO: 4497 - RNA, 19 nt, synthetic construct
  source 1..19: mol_type = other RNA
gactggaagcgatgacaat

SEQ ID NO: 4498 - RNA, 19 nt, synthetic construct
  source 1..19: mol_type = other RNA
gactggaagggatgacaac

SEQ ID NO: 4499 - RNA, 19 nt, synthetic construct
  source 1..19: mol_type = other RNA
gactggaagcgatgacaag

SEQ ID NO: 4500 - RNA, 19 nt, synthetic construct
  source 1..19: mol_type = other RNA
agctcgcatggtcagtaac

SEQ ID NO: 4501 - RNA, 19 nt, synthetic construct
  source 1..19: mol_type = other RNA
agtctacaaaccagttgac

SEQ ID NO: 4502 - RNA, 19 nt, synthetic construct
  source 1..19: mol_type = other RNA
gctcctcgcagttcggttc

SEQ ID NO: 4503 - RNA, 19 nt, synthetic construct
  source 1..19: mol_type = other RNA
gctcctcgcagttcggttg

SEQ ID NO: 4504 - RNA, 19 nt, synthetic construct
  source 1..19: mol_type = other RNA
gctcctcgcagttcggttt

SEQ ID NO: 4505 - RNA, 19 nt, synthetic construct
  source 1..19: mol_type = other RNA
gctcctcgctgttcggttc

SEQ ID NO: 4506 - RNA, 19 nt, synthetic construct
  source 1..19: mol_type = other RNA
cttccgcgagaacgccaac

SEQ ID NO: 4507 - RNA, 19 nt, synthetic construct
  source 1..19: mol_type = other RNA
cttccgcgagaacgccaaa

SEQ ID NO: 4508 - RNA, 19 nt, synthetic construct
  source 1..19: mol_type = other RNA
cttccgcgagaacgccaat

SEQ ID NO: 4509 - RNA, 19 nt, synthetic construct
  source 1..19: mol_type = other RNA
cttccgcgacaacgccaac

SEQ ID NO: 4510 - RNA, 19 nt, synthetic construct
  source 1..19: mol_type = other RNA
cttccgcgagaacgccaag

SEQ ID NO: 4511 - RNA, 19 nt, synthetic construct
  source 1..19: mol_type = other RNA
aaatcagtgatgggagtac

SEQ ID NO: 4512 - RNA, 19 nt, synthetic construct
  source 1..19: mol_type = other RNA
gtcgccgtcttccgccaac

SEQ ID NO: 4513 - RNA, 19 nt, synthetic construct
  source 1..19: mol_type = other RNA
atggtaaaacgaagatcgc

SEQ ID NO: 4514 - RNA, 19 nt, synthetic construct
  source 1..19: mol_type = other RNA
acgaagatcgccacaccgc

SEQ ID NO: 4515 - RNA, 19 nt, synthetic construct
  source 1..19: mol_type = other RNA
cgcagttcggttaattggc

SEQ ID NO: 4516 - RNA, 19 nt, synthetic construct
  source 1..19: mol_type = other RNA
gtactccacccaagtcgcc

SEQ ID NO: 4517 - RNA, 19 nt, synthetic construct
  source 1..19: mol_type = other RNA
ctcggctttggctcgggac

SEQ ID NO: 4518 - RNA, 19 nt, synthetic construct
  source 1..19: mol_type = other RNA
gcccctggggcggtcaatc

SEQ ID NO: 4519 - RNA, 19 nt, synthetic construct
  source 1..19: mol_type = other RNA
ctcgcagttcggttaattc

SEQ ID NO: 4520 - RNA, 19 nt, synthetic construct
  source 1..19: mol_type = other RNA
tcgccgtcttccgccaagc

SEQ ID NO: 4521 - RNA, 19 nt, synthetic construct
  source 1..19: mol_type = other RNA
gacgggactggaagcgatc

SEQ ID NO: 4522 - RNA, 19 nt, synthetic construct
  source 1..19: mol_type = other RNA
tggtaaaacgaagatcgcc

SEQ ID NO: 4523 - RNA, 19 nt, synthetic construct
  source 1..19: mol_type = other RNA
gtaaaacgaagatcgccac

SEQ ID NO: 4524 - RNA, 19 nt, synthetic construct
  source 1..19: mol_type = other RNA
acaatatcacccacgtccc

SEQ ID NO: 4525 - RNA, 19 nt, synthetic construct
  source 1..19: mol_type = other RNA
ccttccgcgagaacgccac

SEQ ID NO: 4526 - RNA, 19 nt, synthetic construct
  source 1..19: mol_type = other RNA
gggggctgatggtaaaacc

SEQ ID NO: 4527 - RNA, 19 nt, synthetic construct
  source 1..19: mol_type = other RNA
gccgtcttccgccaagagc

SEQ ID NO: 4528 - RNA, 19 nt, synthetic construct
  source 1..19: mol_type = other RNA
caccggcagcatcgacatc

SEQ ID NO: 4529 - RNA, 19 nt, synthetic construct
  source 1..19: mol_type = other RNA
gtaaaagcaaagacgggac

SEQ ID NO: 4530 - RNA, 19 nt, synthetic construct
  source 1..19: mol_type = other RNA
aggtttctaacccaccctc

SEQ ID NO: 4531 - RNA, 19 nt, synthetic construct
  source 1..19: mol_type = other RNA
ttccgcgagaacgccaaac

SEQ ID NO: 4532 - RNA, 19 nt, synthetic construct
  source 1..19: mol_type = other RNA
gaccttccgcgagaacgcc

SEQ ID NO: 4533 - RNA, 19 nt, synthetic construct
  source 1..19: mol_type = other RNA
cgccacgctagctgacgac

SEQ ID NO: 4534 - RNA, 19 nt, synthetic construct
  source 1..19: mol_type = other RNA
acctgcgtgtcccatctac

SEQ ID NO: 4535 - RNA, 19 nt, synthetic construct
  source 1..19: mol_type = other RNA
ccccagctcgccacgctac

SEQ ID NO: 4536 - RNA, 19 nt, synthetic construct
  source 1..19: mol_type = other RNA
gccgttcagctgtgacgac

SEQ ID NO: 4537 - RNA, 19 nt, synthetic construct
  source 1..19: mol_type = other RNA
gctgatggtaaaacgaagc

SEQ ID NO: 4538 - RNA, 19 nt, synthetic construct
  source 1..19: mol_type = other RNA
acgaggtgtctctcacccc

SEQ ID NO: 4539 - RNA, 19 nt, synthetic construct
  source 1..19: mol_type = other RNA
gggccagcctaagatcatc

SEQ ID NO: 4540 - RNA, 19 nt, synthetic construct
  source 1..19: mol_type = other RNA
tctaacccaccctcacgac

SEQ ID NO: 4541 - RNA, 19 nt, synthetic construct
  source 1..19: mol_type = other RNA
taaagaggtttctaacccc

SEQ ID NO: 4542 - RNA, 19 nt, synthetic construct
  source 1..19: mol_type = other RNA
ctcacctcctaatagactc

SEQ ID NO: 4543 - RNA, 19 nt, synthetic construct
  source 1..19: mol_type = other RNA
ggatatactgtatgccggc

SEQ ID NO: 4544 - RNA, 19 nt, synthetic construct
  source 1..19: mol_type = other RNA
caccctcacgaggtgtctc

SEQ ID NO: 4545 - RNA, 19 nt, synthetic construct
  source 1..19: mol_type = other RNA
cacgctagctgacgaggtc

SEQ ID NO: 4546 - RNA, 19 nt, synthetic construct
  source 1..19: mol_type = other RNA
tcccatgatttcttcggtc

SEQ ID NO: 4547 - RNA, 19 nt, synthetic construct
  source 1..19: mol_type = other RNA
ttgagttgtagttggattc

SEQ ID NO: 4548 - RNA, 19 nt, synthetic construct
  source 1..19: mol_type = other RNA
ctgcgtgtcccatctacac

SEQ ID NO: 4549 - RNA, 19 nt, synthetic construct
  source 1..19: mol_type = other RNA
gttgagttgtagttggatc

SEQ ID NO: 4550 - RNA, 19 nt, synthetic construct
  source 1..19: mol_type = other RNA
ggtggtggttagagatatc

SEQ ID NO: 4551 - RNA, 19 nt, synthetic construct
  source 1..19: mol_type = other RNA
gggctagataggatatacc

SEQ ID NO: 4552 - RNA, 19 nt, synthetic construct
  source 1..19: mol_type = other RNA
aggattccagcaaaaaccc

SEQ ID NO: 4553 - RNA, 19 nt, synthetic construct
  source 1..19: mol_type = other RNA
ggcccctggggcggtcaac

SEQ ID NO: 4554 - RNA, 19 nt, synthetic construct
  source 1..19: mol_type = other RNA
gattaggactgaagcgatc

SEQ ID NO: 4555 - RNA, 19 nt, synthetic construct
  source 1..19: mol_type = other RNA
ctcccaagttttgaaaggc

SEQ ID NO: 4556 - RNA, 19 nt, synthetic construct
  source 1..19: mol_type = other RNA
gctggtctggcttgcggcc

SEQ ID NO: 4557 - RNA, 19 nt, synthetic construct
  source 1..19: mol_type = other RNA
gttccactcatccaactgc

SEQ ID NO: 4558 - RNA, 19 nt, synthetic construct
  source 1..19: mol_type = other RNA
cacctcctaatagacttac

SEQ ID NO: 4559 - RNA, 19 nt, synthetic construct
  source 1..19: mol_type = other RNA
ttctaacccaccctcacgc

SEQ ID NO: 4560 - RNA, 19 nt, synthetic construct
  source 1..19: mol_type = other RNA
aagcccacaatcatgcctc

SEQ ID NO: 4561 - RNA, 19 nt, synthetic construct
  source 1..19: mol_type = other RNA
accttccgcgagaacgccc

SEQ ID NO: 4562 - RNA, 19 nt, synthetic construct
  source 1..19: mol_type = other RNA
gctggtcacgtgacccaac

SEQ ID NO: 4563 - RNA, 19 nt, synthetic construct
  source 1..19: mol_type = other RNA
taacccaccctcacgaggc

SEQ ID NO: 4564 - RNA, 19 nt, synthetic construct
  source 1..19: mol_type = other RNA
cttacaactcctgcatcac

SEQ ID NO: 4565 - RNA, 19 nt, synthetic construct
  source 1..19: mol_type = other RNA
tgggactttagggctaacc

SEQ ID NO: 4566 - RNA, 19 nt, synthetic construct
  source 1..19: mol_type = other RNA
gccacaggcagacgatgtc

SEQ ID NO: 4567 - RNA, 19 nt, synthetic construct
  source 1..19: mol_type = other RNA
gcctcttgggagacgtccc

SEQ ID NO: 4568 - RNA, 19 nt, synthetic construct
  source 1..19: mol_type = other RNA
gagatatgcccccctcatc

SEQ ID NO: 4569 - RNA, 19 nt, synthetic construct
  source 1..19: mol_type = other RNA
tcccaagttttgaaaggcc

SEQ ID NO: 4570 - RNA, 19 nt, synthetic construct
  source 1..19: mol_type = other RNA
agttattactctgattaac

SEQ ID NO: 4571 - RNA, 19 nt, synthetic construct
  source 1..19: mol_type = other RNA
tatgcccccctcattactc

SEQ ID NO: 4572 - RNA, 19 nt, synthetic construct
  source 1..19: mol_type = other RNA
caaaatcaggggatcgcac

SEQ ID NO: 4573 - RNA, 19 nt, synthetic construct
  source 1..19: mol_type = other RNA
cagaccacggggcggagac

SEQ ID NO: 4574 - RNA, 19 nt, synthetic construct
  source 1..19: mol_type = other RNA
cttgggtgggctagatagc

SEQ ID NO: 4575 - RNA, 19 nt, synthetic construct
  source 1..19: mol_type = other RNA
ctcgccacgctagctgacc

SEQ ID NO: 4576 - RNA, 19 nt, synthetic construct
  source 1..19: mol_type = other RNA
tgttgagttgtagttggac

SEQ ID NO: 4577 - RNA, 19 nt, synthetic construct
  source 1..19: mol_type = other RNA
tatacatagatgttgcccc

SEQ ID NO: 4578 - RNA, 19 nt, synthetic construct
  source 1..19: mol_type = other RNA
aacccaccctcacgaggtc

SEQ ID NO: 4579 - RNA, 19 nt, synthetic construct
  source 1..19: mol_type = other RNA
gttgagcaggactatttcc

SEQ ID NO: 4580 - RNA, 19 nt, synthetic construct
  source 1..19: mol_type = other RNA
ccacgctagctgacgaggc

SEQ ID NO: 4581 - RNA, 19 nt, synthetic construct
  source 1..19: mol_type = other RNA
ctcctaatagacttagccc

SEQ ID NO: 4582 - RNA, 19 nt, synthetic construct
  source 1..19: mol_type = other RNA
gatttcttcggtaattctc

SEQ ID NO: 4583 - RNA, 19 nt, synthetic construct
  source 1..19: mol_type = other RNA
gtcccaaaggaggcttacc

SEQ ID NO: 4584 - RNA, 19 nt, synthetic construct
  source 1..19: mol_type = other RNA
ggtggttagagatatgccc

SEQ ID NO: 4585 - RNA, 19 nt, synthetic construct
  source 1..19: mol_type = other RNA
ggctagataggatatactc

SEQ ID NO: 4586 - RNA, 19 nt, synthetic construct
  source 1..19: mol_type = other RNA
attcaccagagtgactatc

SEQ ID NO: 4587 - RNA, 19 nt, synthetic construct
  source 1..19: mol_type = other RNA
gatatactgtatgccggcc

SEQ ID NO: 4588 - RNA, 19 nt, synthetic construct
  source 1..19: mol_type = other RNA
gaccacagcagggattggc

SEQ ID NO: 4589 - RNA, 19 nt, synthetic construct
  source 1..19: mol_type = other RNA
gagccacaggcagacgatc

SEQ ID NO: 4590 - RNA, 19 nt, synthetic construct
  source 1..19: mol_type = other RNA
ctagctgacgaggtgtctc

SEQ ID NO: 4591 - RNA, 19 nt, synthetic construct
  source 1..19: mol_type = other RNA
aagggggctgatggtaaac

SEQ ID NO: 4592 - RNA, 19 nt, synthetic construct
  source 1..19: mol_type = other RNA
atcaggggatcgcagcggc

SEQ ID NO: 4593 - RNA, 19 nt, synthetic construct
  source 1..19: mol_type = other RNA
cccagctcgccacgctagc

SEQ ID NO: 4594 - RNA, 19 nt, synthetic construct
  source 1..19: mol_type = other RNA
cgttcagctgtgacgaagc

SEQ ID NO: 4595 - RNA, 19 nt, synthetic construct
  source 1..19: mol_type = other RNA
cacttgcaagtcccatgac

SEQ ID NO: 4596 - RNA, 19 nt, synthetic construct
  source 1..19: mol_type = other RNA
tgggctagataggatatac

SEQ ID NO: 4597 - RNA, 19 nt, synthetic construct
  source 1..19: mol_type = other RNA
tttatgcttggattcaccc

SEQ ID NO: 4598 - RNA, 19 nt, synthetic construct
  source 1..19: mol_type = other RNA
ccaaaatcaggggatcgcc

SEQ ID NO: 4599 - RNA, 19 nt, synthetic construct
  source 1..19: mol_type = other RNA
ccgttcagctgtgacgaac

SEQ ID NO: 4600 - RNA, 19 nt, synthetic construct
  source 1..19: mol_type = other RNA
ggccacatccaacatttcc

SEQ ID NO: 4601 - RNA, 19 nt, synthetic construct
  source 1..19: mol_type = other RNA
tttatcaatagttccattc

SEQ ID NO: 4602 - RNA, 19 nt, synthetic construct
  source 1..19: mol_type = other RNA
ggcggagatcgtgtacaac

SEQ ID NO: 4603 - RNA, 19 nt, synthetic construct
  source 1..19: mol_type = other RNA
tcgccacgctagctgacgc

SEQ ID NO: 4604 - RNA, 19 nt, synthetic construct
  source 1..19: mol_type = other RNA
gtctggcttgcggcgcgac

SEQ ID NO: 4605 - RNA, 19 nt, synthetic construct
  source 1..19: mol_type = other RNA
acctcctaatagacttagc

SEQ ID NO: 4606 - RNA, 19 nt, synthetic construct
  source 1..19: mol_type = other RNA
tgtcccatctacagacctc

SEQ ID NO: 4607 - RNA, 19 nt, synthetic construct
  source 1..19: mol_type = other RNA
cggtaattctgagggtggc

SEQ ID NO: 4608 - RNA, 19 nt, synthetic construct
  source 1..19: mol_type = other RNA
tttcttcggtaattctgac

SEQ ID NO: 4609 - RNA, 19 nt, synthetic construct
  source 1..19: mol_type = other RNA
gcaccctgttgagttgtac

SEQ ID NO: 4610 - RNA, 19 nt, synthetic construct
  source 1..19: mol_type = other RNA
atatactgtatgccggctc

SEQ ID NO: 4611 - RNA, 19 nt, synthetic construct
  source 1..19: mol_type = other RNA
acttctggtttgggtacac

SEQ ID NO: 4612 - RNA, 19 nt, synthetic construct
  source 1..19: mol_type = other RNA
gaagcacaggattaggacc

SEQ ID NO: 4613 - RNA, 19 nt, synthetic construct
  source 1..19: mol_type = other RNA
ctttcaggggtcctaagcc

SEQ ID NO: 4614 - RNA, 19 nt, synthetic construct
  source 1..19: mol_type = other RNA
gatatgcccccctcattac

SEQ ID NO: 4615 - RNA, 19 nt, synthetic construct
  source 1..19: mol_type = other RNA
ctaaggaggccgttcagcc

SEQ ID NO: 4616 - RNA, 19 nt, synthetic construct
  source 1..19: mol_type = other RNA
ggaacacacccccttggac

SEQ ID NO: 4617 - RNA, 19 nt, synthetic construct
  source 1..19: mol_type = other RNA
cctaagcccacaatcatgc

SEQ ID NO: 4618 - RNA, 19 nt, synthetic construct
  source 1..19: mol_type = other RNA
ctggggcctcccaagtttc

SEQ ID NO: 4619 - RNA, 19 nt, synthetic construct
  source 1..19: mol_type = other RNA
tgtcccccacttgcacccc

SEQ ID NO: 4620 - RNA, 19 nt, synthetic construct
  source 1..19: mol_type = other RNA
aagttattactctgattac

SEQ ID NO: 4621 - RNA, 19 nt, synthetic construct
  source 1..19: mol_type = other RNA
aatagacttagccccatgc

SEQ ID NO: 4622 - RNA, 19 nt, synthetic construct
  source 1..19: mol_type = other RNA
cagtaatgaccctggttgc

SEQ ID NO: 4623 - RNA, 19 nt, synthetic construct
  source 1..19: mol_type = other RNA
ggaggaatgtgtaagatac

SEQ ID NO: 4624 - RNA, 19 nt, synthetic construct
  source 1..19: mol_type = other RNA
caatcatgcctccctaagc

SEQ ID NO: 4625 - RNA, 19 nt, synthetic construct
  source 1..19: mol_type = other RNA
tccactcatccaactgggc

SEQ ID NO: 4626 - RNA, 19 nt, synthetic construct
  source 1..19: mol_type = other RNA
aggtgcaggcgtaggaatc

SEQ ID NO: 4627 - RNA, 19 nt, synthetic construct
  source 1..19: mol_type = other RNA
gataggatatactgtatgc

SEQ ID NO: 4628 - RNA, 19 nt, synthetic construct
  source 1..19: mol_type = other RNA
tcctaagcccacaatcatc

SEQ ID NO: 4629 - RNA, 19 nt, synthetic construct
  source 1..19: mol_type = other RNA
ggccgttcagctgtgacgc

SEQ ID NO: 4630 - RNA, 19 nt, synthetic construct
  source 1..19: mol_type = other RNA
tggccacatccaacatttc

SEQ ID NO: 4631 - RNA, 19 nt, synthetic construct
  source 1..19: mol_type = other RNA
agcaggactatttctggcc

SEQ ID NO: 4632 - RNA, 19 nt, synthetic construct
  source 1..19: mol_type = other RNA
atatggacatctggttgcc

SEQ ID NO: 4633 - RNA, 19 nt, synthetic construct
  source 1..19: mol_type = other RNA
acttgcaccctagcttgtc

SEQ ID NO: 4634 - RNA, 19 nt, synthetic construct
  source 1..19: mol_type = other RNA
gtaaagaggtttctaaccc

SEQ ID NO: 4635 - RNA, 19 nt, synthetic construct
  source 1..19: mol_type = other RNA
gactcactttatcaatagc

SEQ ID NO: 4636 - RNA, 19 nt, synthetic construct
  source 1..19: mol_type = other RNA
agctgctgactcactttac

SEQ ID NO: 4637 - RNA, 19 nt, synthetic construct
  source 1..19: mol_type = other RNA
aagggttaccctgggcacc

SEQ ID NO: 4638 - RNA, 19 nt, synthetic construct
  source 1..19: mol_type = other RNA
tgtaaagaggtttctaacc

SEQ ID NO: 4639 - RNA, 19 nt, synthetic construct
  source 1..19: mol_type = other RNA
tggcttgcggcgcgaggac

SEQ ID NO: 4640 - RNA, 19 nt, synthetic construct
  source 1..19: mol_type = other RNA
gccacgctagctgacgagc

SEQ ID NO: 4641 - RNA, 19 nt, synthetic construct
  source 1..19: mol_type = other RNA
cccaaaggaggcttacaac

SEQ ID NO: 4642 - RNA, 19 nt, synthetic construct
  source 1..19: mol_type = other RNA
tgttgtgctatggggggac

SEQ ID NO: 4643 - RNA, 19 nt, synthetic construct
  source 1..19: mol_type = other RNA
gggaacacacccccttggc

SEQ ID NO: 4644 - RNA, 19 nt, synthetic construct
  source 1..19: mol_type = other RNA
ttccaaattgatgggtggc

SEQ ID NO: 4645 - RNA, 19 nt, synthetic construct
  source 1..19: mol_type = other RNA
accggcagcatcgacatgc

SEQ ID NO: 4646 - RNA, 19 nt, synthetic construct
  source 1..19: mol_type = other RNA
ctggcttgcggcgcgaggc

SEQ ID NO: 4647 - RNA, 19 nt, synthetic construct
  source 1..19: mol_type = other RNA
gtgtaagatagttaacatc

SEQ ID NO: 4648 - RNA, 19 nt, synthetic construct
  source 1..19: mol_type = other RNA
aggattaggactgaagcgc

SEQ ID NO: 4649 - RNA, 19 nt, synthetic construct
  source 1..19: mol_type = other RNA
aatgtgtaagatagttaac

SEQ ID NO: 4650 - RNA, 19 nt, synthetic construct
  source 1..19: mol_type = other RNA
ggccagcctaagatcatgc

SEQ ID NO: 4651 - RNA, 19 nt, synthetic construct
  source 1..19: mol_type = other RNA
agttccatttaaattgacc

SEQ ID NO: 4652 - RNA, 19 nt, synthetic construct
  source 1..19: mol_type = other RNA
tccatttaaattgacttcc

SEQ ID NO: 4653 - RNA, 19 nt, synthetic construct
  source 1..19: mol_type = other RNA
cccaccctcacgaggtgtc

SEQ ID NO: 4654 - RNA, 19 nt, synthetic construct
  source 1..19: mol_type = other RNA
catcttagcttagctttcc

SEQ ID NO: 4655 - RNA, 19 nt, synthetic construct
  source 1..19: mol_type = other RNA
acttagccccatgagtttc

SEQ ID NO: 4656 - RNA, 19 nt, synthetic construct
  source 1..19: mol_type = other RNA
tcatggtttagggtgatcc

SEQ ID NO: 4657 - RNA, 19 nt, synthetic construct
  source 1..19: mol_type = other RNA
gcctgaagcacaggattac

SEQ ID NO: 4658 - RNA, 19 nt, synthetic construct
  source 1..19: mol_type = other RNA
catactgagggtgaaattc

SEQ ID NO: 4659 - RNA, 19 nt, synthetic construct
  source 1..19: mol_type = other RNA
aagatcatggtttagggtc

SEQ ID NO: 4660 - RNA, 19 nt, synthetic construct
  source 1..19: mol_type = other RNA
gggatctcccccttgtggc

SEQ ID NO: 4661 - RNA, 19 nt, synthetic construct
  source 1..19: mol_type = other RNA
gaggaatgtgtaagatagc

SEQ ID NO: 4662 - RNA, 19 nt, synthetic construct
  source 1..19: mol_type = other RNA
atcatggtttagggtgatc

SEQ ID NO: 4663 - RNA, 19 nt, synthetic construct
  source 1..19: mol_type = other RNA
cagcatcgacatggtagac

SEQ ID NO: 4664 - RNA, 19 nt, synthetic construct
  source 1..19: mol_type = other RNA
ggtgcaggcgtaggaatac

SEQ ID NO: 4665 - RNA, 19 nt, synthetic construct
  source 1..19: mol_type = other RNA
aggaatgtgtaagatagtc

SEQ ID NO: 4666 - RNA, 19 nt, synthetic construct
  source 1..19: mol_type = other RNA
catggtttagggtgatcac

SEQ ID NO: 4667 - RNA, 19 nt, synthetic construct
  source 1..19: mol_type = other RNA
tccacccaagtcgccgtcc

SEQ ID NO: 4668 - RNA, 19 nt, synthetic construct
  source 1..19: mol_type = other RNA
tcagtaatgaccctggttc

SEQ ID NO: 4669 - RNA, 19 nt, synthetic construct
  source 1..19: mol_type = other RNA
ctgggactttagggctaac

SEQ ID NO: 4670 - RNA, 19 nt, synthetic construct
  source 1..19: mol_type = other RNA
caggcgtaggaatatggac

SEQ ID NO: 4671 - RNA, 19 nt, synthetic construct
  source 1..19: mol_type = other RNA
gcaggcgtaggaatatggc

SEQ ID NO: 4672 - RNA, 19 nt, synthetic construct
  source 1..19: mol_type = other RNA
agccacgaggtcggggcgc

SEQ ID NO: 4673 - RNA, 19 nt, synthetic construct
  source 1..19: mol_type = other RNA
aatcatgcctccctaagac

SEQ ID NO: 4674 - RNA, 19 nt, synthetic construct
  source 1..19: mol_type = other RNA
taagccgttggcacctctc

SEQ ID NO: 4675 - RNA, 19 nt, synthetic construct
  source 1..19: mol_type = other RNA
atcgacatggtagactcgc

SEQ ID NO: 4676 - RNA, 19 nt, synthetic construct
  source 1..19: mol_type = other RNA
tcttcggtaattctgaggc

SEQ ID NO: 4677 - RNA, 19 nt, synthetic construct
  source 1..19: mol_type = other RNA
aagtcgccagtggtgtctc

SEQ ID NO: 4678 - RNA, 19 nt, synthetic construct
  source 1..19: mol_type = other RNA
ataaattgaaaaggcacgc

SEQ ID NO: 4679 - RNA, 19 nt, synthetic construct
  source 1..19: mol_type = other RNA
gttagaggcccttggggtc

SEQ ID NO: 4680 - RNA, 19 nt, synthetic construct
  source 1..19: mol_type = other RNA
aatcaggggatcgcagcgc

SEQ ID NO: 4681 - RNA, 19 nt, synthetic construct
  source 1..19: mol_type = other RNA
taagatagttaacatgggc

SEQ ID NO: 4682 - RNA, 19 nt, synthetic construct
  source 1..19: mol_type = other RNA
tgtaagatagttaacatgc

SEQ ID NO: 4683 - RNA, 19 nt, synthetic construct
  source 1..19: mol_type = other RNA
cggccgcctgtccttggtc

SEQ ID NO: 4684 - RNA, 19 nt, synthetic construct
  source 1..19: mol_type = other RNA
ttagaggcccttggggttc

SEQ ID NO: 4685 - RNA, 19 nt, synthetic construct
  source 1..19: mol_type = other RNA
gggatcgcagcggctacac

SEQ ID NO: 4686 - RNA, 19 nt, synthetic construct
  source 1..19: mol_type = other RNA
cacgaggtcggggcgaggc

SEQ ID NO: 4687 - RNA, 19 nt, synthetic construct
  source 1..19: mol_type = other RNA
tgaagtcccgagccaaagc

SEQ ID NO: 4688 - RNA, 19 nt, synthetic construct
  source 1..19: mol_type = other RNA
tggcgagtctaccatgtcg

SEQ ID NO: 4689 - RNA, 19 nt, synthetic construct
  source 1..19: mol_type = other RNA
ttaaccgaactgcgaggag

SEQ ID NO: 4690 - RNA, 19 nt, synthetic construct
  source 1..19: mol_type = other RNA
taagtcccgagccaaagcc

SEQ ID NO: 4691 - RNA, 19 nt, synthetic construct
  source 1..19: mol_type = other RNA
tagtctaccatgtcgatgc

SEQ ID NO: 4692 - RNA, 19 nt, synthetic construct
  source 1..19: mol_type = other RNA
taccgaactgcgaggagca

SEQ ID NO: 4693 - RNA, 19 nt, synthetic construct
  source 1..19: mol_type = other RNA
taagacggcgacttgggtg

SEQ ID NO: 4694 - RNA, 19 nt, synthetic construct
  source 1..19: mol_type = other RNA
tattaaccgaactgcgagg

SEQ ID NO: 4695 - RNA, 19 nt, synthetic construct
  source 1..19: mol_type = other RNA
tttaaccgaactgcgagga

SEQ ID NO: 4696 - RNA, 19 nt, synthetic construct
  source 1..19: mol_type = other RNA
ttctcgcggaaggtcagct

SEQ ID NO: 4697 - RNA, 19 nt, synthetic construct
  source 1..19: mol_type = other RNA
tttgtcatcgcttccagtc

SEQ ID NO: 4698 - RNA, 19 nt, synthetic construct
  source 1..19: mol_type = other RNA
tttactgaccatgcgagct

SEQ ID NO: 4699 - RNA, 19 nt, synthetic construct
  source 1..19: mol_type = other RNA
ttcaactggtttgtagact

SEQ ID NO: 4700 - RNA, 19 nt, synthetic construct
  source 1..19: mol_type = other RNA
taaccgaactgcgaggagc

SEQ ID NO: 4701 - RNA, 19 nt, synthetic construct
  source 1..19: mol_type = other RNA
tttggcgttctcgcggaag

SEQ ID NO: 4702 - RNA, 19 nt, synthetic construct
  source 1..19: mol_type = other RNA
ttactcccatcactgattt

SEQ ID NO: 4703 - RNA, 19 nt, synthetic construct
  source 1..19: mol_type = other RNA
tttggcggaagacggcgac

SEQ ID NO: 4704 - RNA, 19 nt, synthetic construct
  source 1..19: mol_type = other RNA
tcgatcttcgttttaccat

SEQ ID NO: 4705 - RNA, 19 nt, synthetic construct
  source 1..19: mol_type = other RNA
tcggtgtggcgatcttcgt

SEQ ID NO: 4706 - RNA, 19 nt, synthetic construct
  source 1..19: mol_type = other RNA
tccaattaaccgaactgcg

SEQ ID NO: 4707 - RNA, 19 nt, synthetic construct
  source 1..19: mol_type = other RNA
tgcgacttgggtggagtac

SEQ ID NO: 4708 - RNA, 19 nt, synthetic construct
  source 1..19: mol_type = other RNA
ttcccgagccaaagccgag

SEQ ID NO: 4709 - RNA, 19 nt, synthetic construct
  source 1..19: mol_type = other RNA
tattgaccgccccaggggc

SEQ ID NO: 4710 - RNA, 19 nt, synthetic construct
  source 1..19: mol_type = other RNA
taattaaccgaactgcgag

SEQ ID NO: 4711 - RNA, 19 nt, synthetic construct
  source 1..19: mol_type = other RNA
tcttggcggaagacggcga

SEQ ID NO: 4712 - RNA, 19 nt, synthetic construct
  source 1..19: mol_type = other RNA
tatcgcttccagtcccgtc

SEQ ID NO: 4713 - RNA, 19 nt, synthetic construct
  source 1..19: mol_type = other RNA
tgcgatcttcgttttacca

SEQ ID NO: 4714 - RNA, 19 nt, synthetic construct
  source 1..19: mol_type = other RNA
ttggcgatcttcgttttac

SEQ ID NO: 4715 - RNA, 19 nt, synthetic construct
  source 1..19: mol_type = other RNA
tggacgtgggtgatattgt

SEQ ID NO: 4716 - RNA, 19 nt, synthetic construct
  source 1..19: mol_type = other RNA
ttggcgttctcgcggaagg

SEQ ID NO: 4717 - RNA, 19 nt, synthetic construct
  source 1..19: mol_type = other RNA
tgttttaccatcagccccc

SEQ ID NO: 4718 - RNA, 19 nt, synthetic construct
  source 1..19: mol_type = other RNA
tctcttggcggaagacggc

SEQ ID NO: 4719 - RNA, 19 nt, synthetic construct
  source 1..19: mol_type = other RNA
tatgtcgatgctgccggtg

SEQ ID NO: 4720 - RNA, 19 nt, synthetic construct
  source 1..19: mol_type = other RNA
ttcccgtctttgcttttac

SEQ ID NO: 4721 - RNA, 19 nt, synthetic construct
  source 1..19: mol_type = other RNA
tagggtgggttagaaacct

SEQ ID NO: 4722 - RNA, 19 nt, synthetic construct
  source 1..19: mol_type = other RNA
ttttggcgttctcgcggaa

SEQ ID NO: 4723 - RNA, 19 nt, synthetic construct
  source 1..19: mol_type = other RNA
tgcgttctcgcggaaggtc

SEQ ID NO: 4724 - RNA, 19 nt, synthetic construct
  source 1..19: mol_type = other RNA
ttcgtcagctagcgtggcg

SEQ ID NO: 4725 - RNA, 19 nt, synthetic construct
  source 1..19: mol_type = other RNA
ttagatgggacacgcaggt

SEQ ID NO: 4726 - RNA, 19 nt, synthetic construct
  source 1..19: mol_type = other RNA
ttagcgtggcgagctgggg

SEQ ID NO: 4727 - RNA, 19 nt, synthetic construct
  source 1..19: mol_type = other RNA
ttcgtcacagctgaacggc

SEQ ID NO: 4728 - RNA, 19 nt, synthetic construct
  source 1..19: mol_type = other RNA
tcttcgttttaccatcagc

SEQ ID NO: 4729 - RNA, 19 nt, synthetic construct
  source 1..19: mol_type = other RNA
tgggtgagagacacctcgt

SEQ ID NO: 4730 - RNA, 19 nt, synthetic construct
  source 1..19: mol_type = other RNA
tatgatcttaggctggccc

SEQ ID NO: 4731 - RNA, 19 nt, synthetic construct
  source 1..19: mol_type = other RNA
ttcgtgagggtgggttaga

SEQ ID NO: 4732 - RNA, 19 nt, synthetic construct
  source 1..19: mol_type = other RNA
tgggttagaaacctcttta

SEQ ID NO: 4733 - RNA, 19 nt, synthetic construct
  source 1..19: mol_type = other RNA
tagtctattaggaggtgag

SEQ ID NO: 4734 - RNA, 19 nt, synthetic construct
  source 1..19: mol_type = other RNA
tccggcatacagtatatcc

SEQ ID NO: 4735 - RNA, 19 nt, synthetic construct
  source 1..19: mol_type = other RNA
tagacacctcgtgagggtg

SEQ ID NO: 4736 - RNA, 19 nt, synthetic construct
  source 1..19: mol_type = other RNA
tacctcgtcagctagcgtg

SEQ ID NO: 4737 - RNA, 19 nt, synthetic construct
  source 1..19: mol_type = other RNA
taccgaagaaatcatggga

SEQ ID NO: 4738 - RNA, 19 nt, synthetic construct
  source 1..19: mol_type = other RNA
taatccaactacaactcaa

SEQ ID NO: 4739 - RNA, 19 nt, synthetic construct
  source 1..19: mol_type = other RNA
ttgtagatgggacacgcag

SEQ ID NO: 4740 - RNA, 19 nt, synthetic construct
  source 1..19: mol_type = other RNA
tatccaactacaactcaac

SEQ ID NO: 4741 - RNA, 19 nt, synthetic construct
  source 1..19: mol_type = other RNA
tatatctctaaccaccacc

SEQ ID NO: 4742 - RNA, 19 nt, synthetic construct
  source 1..19: mol_type = other RNA
tgtatatcctatctagccc

SEQ ID NO: 4743 - RNA, 19 nt, synthetic construct
  source 1..19: mol_type = other RNA
tggtttttgctggaatcct

SEQ ID NO: 4744 - RNA, 19 nt, synthetic construct
  source 1..19: mol_type = other RNA
tttgaccgccccaggggcc

SEQ ID NO: 4745 - RNA, 19 nt, synthetic construct
  source 1..19: mol_type = other RNA
tatcgcttcagtcctaatc

SEQ ID NO: 4746 - RNA, 19 nt, synthetic construct
  source 1..19: mol_type = other RNA
tcctttcaaaacttgggag

SEQ ID NO: 4747 - RNA, 19 nt, synthetic construct
  source 1..19: mol_type = other RNA
tgccgcaagccagaccagc

SEQ ID NO: 4748 - RNA, 19 nt, synthetic construct
  source 1..19: mol_type = other RNA
tcagttggatgagtggaac

SEQ ID NO: 4749 - RNA, 19 nt, synthetic construct
  source 1..19: mol_type = other RNA
ttaagtctattaggaggtg

SEQ ID NO: 4750 - RNA, 19 nt, synthetic construct
  source 1..19: mol_type = other RNA
tcgtgagggtgggttagaa

SEQ ID NO: 4751 - RNA, 19 nt, synthetic construct
  source 1..19: mol_type = other RNA
taggcatgattgtgggctt

SEQ ID NO: 4752 - RNA, 19 nt, synthetic construct
  source 1..19: mol_type = other RNA
tggcgttctcgcggaaggt

SEQ ID NO: 4753 - RNA, 19 nt, synthetic construct
  source 1..19: mol_type = other RNA
tttgggtcacgtgaccagc

SEQ ID NO: 4754 - RNA, 19 nt, synthetic construct
  source 1..19: mol_type = other RNA
tcctcgtgagggtgggtta

SEQ ID NO: 4755 - RNA, 19 nt, synthetic construct
  source 1..19: mol_type = other RNA
ttgatgcaggagttgtaag

SEQ ID NO: 4756 - RNA, 19 nt, synthetic construct
  source 1..19: mol_type = other RNA
tgttagccctaaagtccca

SEQ ID NO: 4757 - RNA, 19 nt, synthetic construct
  source 1..19: mol_type = other RNA
tacatcgtctgcctgtggc

SEQ ID NO: 4758 - RNA, 19 nt, synthetic construct
  source 1..19: mol_type = other RNA
tggacgtctcccaagaggc

SEQ ID NO: 4759 - RNA, 19 nt, synthetic construct
  source 1..19: mol_type = other RNA
tatgaggggggcatatctc

SEQ ID NO: 4760 - RNA, 19 nt, synthetic construct
  source 1..19: mol_type = other RNA
tgcctttcaaaacttggga

SEQ ID NO: 4761 - RNA, 19 nt, synthetic construct
  source 1..19: mol_type = other RNA
tttaatcagagtaataact

SEQ ID NO: 4762 - RNA, 19 nt, synthetic construct
  source 1..19: mol_type = other RNA
tagtaatgaggggggcata

SEQ ID NO: 4763 - RNA, 19 nt, synthetic construct
  source 1..19: mol_type = other RNA
ttgcgatcccctgattttg

SEQ ID NO: 4764 - RNA, 19 nt, synthetic construct
  source 1..19: mol_type = other RNA
ttctccgccccgtggtctg

SEQ ID NO: 4765 - RNA, 19 nt, synthetic construct
  source 1..19: mol_type = other RNA
tctatctagcccacccaag

SEQ ID NO: 4766 - RNA, 19 nt, synthetic construct
  source 1..19: mol_type = other RNA
tgtcagctagcgtggcgag

SEQ ID NO: 4767 - RNA, 19 nt, synthetic construct
  source 1..19: mol_type = other RNA
ttccaactacaactcaaca

SEQ ID NO: 4768 - RNA, 19 nt, synthetic construct
  source 1..19: mol_type = other RNA
tgggcaacatctatgtata

SEQ ID NO: 4769 - RNA, 19 nt, synthetic construct
  source 1..19: mol_type = other RNA
tacctcgtgagggtgggtt

SEQ ID NO: 4770 - RNA, 19 nt, synthetic construct
  source 1..19: mol_type = other RNA
tgaaatagtcctgctcaac

SEQ ID NO: 4771 - RNA, 19 nt, synthetic construct
  source 1..19: mol_type = other RNA
tcctcgtcagctagcgtgg

SEQ ID NO: 4772 - RNA, 19 nt, synthetic construct
  source 1..19: mol_type = other RNA
tggctaagtctattaggag

SEQ ID NO: 4773 - RNA, 19 nt, synthetic construct
  source 1..19: mol_type = other RNA
tagaattaccgaagaaatc

SEQ ID NO: 4774 - RNA, 19 nt, synthetic construct
  source 1..19: mol_type = other RNA
tgtaagcctcctttgggac

SEQ ID NO: 4775 - RNA, 19 nt, synthetic construct
  source 1..19: mol_type = other RNA
tggcatatctctaaccacc

SEQ ID NO: 4776 - RNA, 19 nt, synthetic construct
  source 1..19: mol_type = other RNA
tagtatatcctatctagcc

SEQ ID NO: 4777 - RNA, 19 nt, synthetic construct
  source 1..19: mol_type = other RNA
tatagtcactctggtgaat

SEQ ID NO: 4778 - RNA, 19 nt, synthetic construct
  source 1..19: mol_type = other RNA
tgccggcatacagtatatc

SEQ ID NO: 4779 - RNA, 19 nt, synthetic construct
  source 1..19: mol_type = other RNA
tccaatccctgctgtggtc

SEQ ID NO: 4780 - RNA, 19 nt, synthetic construct
  source 1..19: mol_type = other RNA
tatcgtctgcctgtggctc

SEQ ID NO: 4781 - RNA, 19 nt, synthetic construct
  source 1..19: mol_type = other RNA
tagacacctcgtcagctag

SEQ ID NO: 4782 - RNA, 19 nt, synthetic construct
  source 1..19: mol_type = other RNA
ttttaccatcagccccctt

SEQ ID NO: 4783 - RNA, 19 nt, synthetic construct
  source 1..19: mol_type = other RNA
tccgctgcgatcccctgat

SEQ ID NO: 4784 - RNA, 19 nt, synthetic construct
  source 1..19: mol_type = other RNA
tctagcgtggcgagctggg

SEQ ID NO: 4785 - RNA, 19 nt, synthetic construct
  source 1..19: mol_type = other RNA
tcttcgtcacagctgaacg

SEQ ID NO: 4786 - RNA, 19 nt, synthetic construct
  source 1..19: mol_type = other RNA
ttcatgggacttgcaagtg

SEQ ID NO: 4787 - RNA, 19 nt, synthetic construct
  source 1..19: mol_type = other RNA
ttatatcctatctagccca

SEQ ID NO: 4788 - RNA, 19 nt, synthetic construct
  source 1..19: mol_type = other RNA
tggtgaatccaagcataaa

SEQ ID NO: 4789 - RNA, 19 nt, synthetic construct
  source 1..19: mol_type = other RNA
tgcgatcccctgattttgg

SEQ ID NO: 4790 - RNA, 19 nt, synthetic construct
  source 1..19: mol_type = other RNA
tttcgtcacagctgaacgg

SEQ ID NO: 4791 - RNA, 19 nt, synthetic construct
  source 1..19: mol_type = other RNA
tgaaatgttggatgtggcc

SEQ ID NO: 4792 - RNA, 19 nt, synthetic construct
  source 1..19: mol_type = other RNA
taatggaactattgataaa

SEQ ID NO: 4793 - RNA, 19 nt, synthetic construct
  source 1..19: mol_type = other RNA
tttgtacacgatctccgcc

SEQ ID NO: 4794 - RNA, 19 nt, synthetic construct
  source 1..19: mol_type = other RNA
tcgtcagctagcgtggcga

SEQ ID NO: 4795 - RNA, 19 nt, synthetic construct
  source 1..19: mol_type = other RNA
ttcgcgccgcaagccagac

SEQ ID NO: 4796 - RNA, 19 nt, synthetic construct
  source 1..19: mol_type = other RNA
tctaagtctattaggaggt

SEQ ID NO: 4797 - RNA, 19 nt, synthetic construct
  source 1..19: mol_type = other RNA
taggtctgtagatgggaca

SEQ ID NO: 4798 - RNA, 19 nt, synthetic construct
  source 1..19: mol_type = other RNA
tccaccctcagaattaccg

SEQ ID NO: 4799 - RNA, 19 nt, synthetic construct
  source 1..19: mol_type = other RNA
ttcagaattaccgaagaaa

SEQ ID NO: 4800 - RNA, 19 nt, synthetic construct
  source 1..19: mol_type = other RNA
ttacaactcaacagggtgc

SEQ ID NO: 4801 - RNA, 19 nt, synthetic construct
  source 1..19: mol_type = other RNA
tagccggcatacagtatat

SEQ ID NO: 4802 - RNA, 19 nt, synthetic construct
  source 1..19: mol_type = other RNA
ttgtacccaaaccagaagt

SEQ ID NO: 4803 - RNA, 19 nt, synthetic construct
  source 1..19: mol_type = other RNA
tgtcctaatcctgtgcttc

SEQ ID NO: 4804 - RNA, 19 nt, synthetic construct
  source 1..19: mol_type = other RNA
tgcttaggacccctgaaag

SEQ ID NO: 4805 - RNA, 19 nt, synthetic construct
  source 1..19: mol_type = other RNA
ttaatgaggggggcatatc

SEQ ID NO: 4806 - RNA, 19 nt, synthetic construct
  source 1..19: mol_type = other RNA
tgctgaacggcctccttag

SEQ ID NO: 4807 - RNA, 19 nt, synthetic construct
  source 1..19: mol_type = other RNA
ttccaagggggtgtgttcc

SEQ ID NO: 4808 - RNA, 19 nt, synthetic construct
  source 1..19: mol_type = other RNA
tcatgattgtgggcttagg

SEQ ID NO: 4809 - RNA, 19 nt, synthetic construct
  source 1..19: mol_type = other RNA
taaacttgggaggccccag

SEQ ID NO: 4810 - RNA, 19 nt, synthetic construct
  source 1..19: mol_type = other RNA
tgggtgcaagtgggggaca

SEQ ID NO: 4811 - RNA, 19 nt, synthetic construct
  source 1..19: mol_type = other RNA
ttaatcagagtaataactt

SEQ ID NO: 4812 - RNA, 19 nt, synthetic construct
  source 1..19: mol_type = other RNA
tcatggggctaagtctatt

SEQ ID NO: 4813 - RNA, 19 nt, synthetic construct
  source 1..19: mol_type = other RNA
tcaaccagggtcattactg

SEQ ID NO: 4814 - RNA, 19 nt, synthetic construct
  source 1..19: mol_type = other RNA
ttatcttacacattcctcc

SEQ ID NO: 4815 - RNA, 19 nt, synthetic construct
  source 1..19: mol_type = other RNA
tcttagggaggcatgattg

SEQ ID NO: 4816 - RNA, 19 nt, synthetic construct
  source 1..19: mol_type = other RNA
tcccagttggatgagtgga

SEQ ID NO: 4817 - RNA, 19 nt, synthetic construct
  source 1..19: mol_type = other RNA
tattcctacgcctgcacct

SEQ ID NO: 4818 - RNA, 19 nt, synthetic construct
  source 1..19: mol_type = other RNA
tcatacagtatatcctatc

SEQ ID NO: 4819 - RNA, 19 nt, synthetic construct
  source 1..19: mol_type = other RNA
tatgattgtgggcttagga

SEQ ID NO: 4820 - RNA, 19 nt, synthetic construct
  source 1..19: mol_type = other RNA
tcgtcacagctgaacggcc

SEQ ID NO: 4821 - RNA, 19 nt, synthetic construct
  source 1..19: mol_type = other RNA
taaatgttggatgtggcca

SEQ ID NO: 4822 - RNA, 19 nt, synthetic construct
  source 1..19: mol_type = other RNA
tgccagaaatagtcctgct

SEQ ID NO: 4823 - RNA, 19 nt, synthetic construct
  source 1..19: mol_type = other RNA
tgcaaccagatgtccatat

SEQ ID NO: 4824 - RNA, 19 nt, synthetic construct
  source 1..19: mol_type = other RNA
tacaagctagggtgcaagt

SEQ ID NO: 4825 - RNA, 19 nt, synthetic construct
  source 1..19: mol_type = other RNA
tggttagaaacctctttac

SEQ ID NO: 4826 - RNA, 19 nt, synthetic construct
  source 1..19: mol_type = other RNA
tctattgataaagtgagtc

SEQ ID NO: 4827 - RNA, 19 nt, synthetic construct
  source 1..19: mol_type = other RNA
ttaaagtgagtcagcagct

SEQ ID NO: 4828 - RNA, 19 nt, synthetic construct
  source 1..19: mol_type = other RNA
tgtgcccagggtaaccctt

SEQ ID NO: 4829 - RNA, 19 nt, synthetic construct
  source 1..19: mol_type = other RNA
tgttagaaacctctttaca

SEQ ID NO: 4830 - RNA, 19 nt, synthetic construct
  source 1..19: mol_type = other RNA
ttcctcgcgccgcaagcca

SEQ ID NO: 4831 - RNA, 19 nt, synthetic construct
  source 1..19: mol_type = other RNA
tctcgtcagctagcgtggc

SEQ ID NO: 4832 - RNA, 19 nt, synthetic construct
  source 1..19: mol_type = other RNA
tttgtaagcctcctttggg

SEQ ID NO: 4833 - RNA, 19 nt, synthetic construct
  source 1..19: mol_type = other RNA
ttccccccatagcacaaca

SEQ ID NO: 4834 - RNA, 19 nt, synthetic construct
  source 1..19: mol_type = other RNA
tccaagggggtgtgttccc

SEQ ID NO: 4835 - RNA, 19 nt, synthetic construct
  source 1..19: mol_type = other RNA
tccacccatcaatttggaa

SEQ ID NO: 4836 - RNA, 19 nt, synthetic construct
  source 1..19: mol_type = other RNA
tcatgtcgatgctgccggt

SEQ ID NO: 4837 - RNA, 19 nt, synthetic construct
  source 1..19: mol_type = other RNA
tcctcgcgccgcaagccag

SEQ ID NO: 4838 - RNA, 19 nt, synthetic construct
  source 1..19: mol_type = other RNA
tatgttaactatcttacac

SEQ ID NO: 4839 - RNA, 19 nt, synthetic construct
  source 1..19: mol_type = other RNA
tcgcttcagtcctaatcct

SEQ ID NO: 4840 - RNA, 19 nt, synthetic construct
  source 1..19: mol_type = other RNA
tttaactatcttacacatt

SEQ ID NO: 4841 - RNA, 19 nt, synthetic construct
  source 1..19: mol_type = other RNA
tcatgatcttaggctggcc

SEQ ID NO: 4842 - RNA, 19 nt, synthetic construct
  source 1..19: mol_type = other RNA
tgtcaatttaaatggaact

SEQ ID NO: 4843 - RNA, 19 nt, synthetic construct
  source 1..19: mol_type = other RNA
tgaagtcaatttaaatgga

SEQ ID NO: 4844 - RNA, 19 nt, synthetic construct
  source 1..19: mol_type = other RNA
tacacctcgtgagggtggg

SEQ ID NO: 4845 - RNA, 19 nt, synthetic construct
  source 1..19: mol_type = other RNA
tgaaagctaagctaagatg

SEQ ID NO: 4846 - RNA, 19 nt, synthetic construct
  source 1..19: mol_type = other RNA
taaactcatggggctaagt

SEQ ID NO: 4847 - RNA, 19 nt, synthetic construct
  source 1..19: mol_type = other RNA
tgatcaccctaaaccatga

SEQ ID NO: 4848 - RNA, 19 nt, synthetic construct
  source 1..19: mol_type = other RNA
ttaatcctgtgcttcaggc

SEQ ID NO: 4849 - RNA, 19 nt, synthetic construct
  source 1..19: mol_type = other RNA
taatttcaccctcagtatg

SEQ ID NO: 4850 - RNA, 19 nt, synthetic construct
  source 1..19: mol_type = other RNA
taccctaaaccatgatctt

SEQ ID NO: 4851 - RNA, 19 nt, synthetic construct
  source 1..19: mol_type = other RNA
tccacaagggggagatccc

SEQ ID NO: 4852 - RNA, 19 nt, synthetic construct
  source 1..19: mol_type = other RNA
tctatcttacacattcctc

SEQ ID NO: 4853 - RNA, 19 nt, synthetic construct
  source 1..19: mol_type = other RNA
tatcaccctaaaccatgat

SEQ ID NO: 4854 - RNA, 19 nt, synthetic construct
  source 1..19: mol_type = other RNA
ttctaccatgtcgatgctg

SEQ ID NO: 4855 - RNA, 19 nt, synthetic construct
  source 1..19: mol_type = other RNA
ttattcctacgcctgcacc

SEQ ID NO: 4856 - RNA, 19 nt, synthetic construct
  source 1..19: mol_type = other RNA
tactatcttacacattcct

SEQ ID NO: 4857 - RNA, 19 nt, synthetic construct
  source 1..19: mol_type = other RNA
ttgatcaccctaaaccatg

SEQ ID NO: 4858 - RNA, 19 nt, synthetic construct
  source 1..19: mol_type = other RNA
tgacggcgacttgggtgga

SEQ ID NO: 4859 - RNA, 19 nt, synthetic construct
  source 1..19: mol_type = other RNA
taaccagggtcattactga

SEQ ID NO: 4860 - RNA, 19 nt, synthetic construct
  source 1..19: mol_type = other RNA
tttagccctaaagtcccag

SEQ ID NO: 4861 - RNA, 19 nt, synthetic construct
  source 1..19: mol_type = other RNA
ttccatattcctacgcctg

SEQ ID NO: 4862 - RNA, 19 nt, synthetic construct
  source 1..19: mol_type = other RNA
tccatattcctacgcctgc

SEQ ID NO: 4863 - RNA, 19 nt, synthetic construct
  source 1..19: mol_type = other RNA
tcgccccgacctcgtggct

SEQ ID NO: 4864 - RNA, 19 nt, synthetic construct
  source 1..19: mol_type = other RNA
ttcttagggaggcatgatt

SEQ ID NO: 4865 - RNA, 19 nt, synthetic construct
  source 1..19: mol_type = other RNA
tagaggtgccaacggctta

SEQ ID NO: 4866 - RNA, 19 nt, synthetic construct
  source 1..19: mol_type = other RNA
tcgagtctaccatgtcgat

SEQ ID NO: 4867 - RNA, 19 nt, synthetic construct
  source 1..19: mol_type = other RNA
tcctcagaattaccgaaga

SEQ ID NO: 4868 - RNA, 19 nt, synthetic construct
  source 1..19: mol_type = other RNA
tagacaccactggcgactt

SEQ ID NO: 4869 - RNA, 19 nt, synthetic construct
  source 1..19: mol_type = other RNA
tcgtgccttttcaatttat

SEQ ID NO: 4870 - RNA, 19 nt, synthetic construct
  source 1..19: mol_type = other RNA
taccccaagggcctctaac

SEQ ID NO: 4871 - RNA, 19 nt, synthetic construct
  source 1..19: mol_type = other RNA
tcgctgcgatcccctgatt

SEQ ID NO: 4872 - RNA, 19 nt, synthetic construct
  source 1..19: mol_type = other RNA
tcccatgttaactatctta

SEQ ID NO: 4873 - RNA, 19 nt, synthetic construct
  source 1..19: mol_type = other RNA
tcatgttaactatcttaca

SEQ ID NO: 4874 - RNA, 19 nt, synthetic construct
  source 1..19: mol_type = other RNA
taccaaggacaggcggccg

SEQ ID NO: 4875 - RNA, 19 nt, synthetic construct
  source 1..19: mol_type = other RNA
taaccccaagggcctctaa

SEQ ID NO: 4876 - RNA, 19 nt, synthetic construct
  source 1..19: mol_type = other RNA
ttgtagccgctgcgatccc

SEQ ID NO: 4877 - RNA, 19 nt, synthetic construct
  source 1..19: mol_type = other RNA
tcctcgccccgacctcgtg

SEQ ID NO: 4878 - RNA, 50 nt, synthetic construct
  source 1..50: mol_type = other RNA
tttatgcctcatcctctgagtgctgaaggcttgctgtaggctgtatgctg

SEQ ID NO: 4879 - RNA, 54 nt, synthetic construct
  source 1..54: mol_type = other RNA
gtgctgggcggggggcggcgggccctcccgcagaacaccatgcgctcttcggaa

SEQ ID NO: 4880 - RNA, 100 nt, synthetic construct
  source 1..100: mol_type = other RNA
gaagcaaagaaggggcagagggagcccgtgagctgagtgggccagggactgggagaaggagtgaggaggcagggccggcatgcctctgctgctggccaga

SEQ ID NO: 4881 - RNA, 54 nt, synthetic construct
  source 1..54: mol_type = other RNA
gtgctgggcggggggcggcgggccctcccgcagaacaccatgcgctcttcggga

SEQ ID NO: 4882 - RNA, 54 nt, synthetic construct
  source 1..54: mol_type = other RNA
gtgctgggcggggggcggcgggccctcccgcagaacaccatgcgctccacggaa

SEQ ID NO: 4883 - RNA, 35 nt, synthetic construct
  source 1..35: mol_type = other RNA
gggccctcccgcagaacaccatgcgctccacggaa

SEQ ID NO: 4884 - RNA, 30 nt, synthetic construct
  source 1..30: mol_type = other RNA
ctcccgcagaacaccatgcgctccacggaa

SEQ ID NO: 4885 - RNA, 55 nt, synthetic construct
  source 1..55: mol_type = other RNA
gtgctgggcggggggcggcgggccctcccgcagaacaccatgcgctccacggaag

SEQ ID NO: 4886 - RNA, 54 nt, synthetic construct
  source 1..54: mol_type = other RNA
gtgctgggcggggggcggcgggccctcccgcagaacaccatgcgctcctcggaa

SEQ ID NO: 4887 - RNA, 10 nt, synthetic construct
  source 1..10: mol_type = other RNA
tgtgacctgg

SEQ ID NO: 4888 - RNA, 10 nt, synthetic construct
  source 1..10: mol_type = other RNA
tgtgatttgg

SEQ ID NO: 4889 - RNA, 10 nt, synthetic construct
  source 1..10: mol_type = other RNA
tataatttgg

SEQ ID NO: 4890 - RNA, 11 nt, synthetic construct
  source 1..11: mol_type = other RNA
cctgacccagt

SEQ ID NO: 4891 - RNA, 18 nt, synthetic construct
  source 1..18: mol_type = other RNA
gtctgcacctgtcactag

SEQ ID NO: 4892 - RNA, 10 nt, synthetic construct
  source 1..10: mol_type = other RNA
gtgacccaag

SEQ ID NO: 4893 - RNA, 15 nt, synthetic construct
  source 1..15: mol_type = other RNA
gtggccactgagaag

SEQ ID NO: 4894 - RNA, 10 nt, synthetic construct
  source 1..10: mol_type = other RNA
gtgacccaat

SEQ ID NO: 4895 - RNA, 10 nt, synthetic construct
  source 1..10: mol_type = other RNA
gtgacccaac

SEQ ID NO: 4896 - RNA, 15 nt, synthetic construct
  source 1..15: mol_type = other RNA
gtggccactgagaaa

SEQ ID NO: 4897 - RNA, 50 nt, synthetic construct
  source 1..50: mol_type = other RNA
agtgtatgatgcctgttactagcattcacatggaacaaattgctgccgtg

SEQ ID NO: 4898 - RNA, 52 nt, synthetic construct
  source 1..52: mol_type = other RNA
ctgaggagcgccttgacagcagccatgggagggccgccccctacctcagtga

SEQ ID NO: 4899 - RNA, 52 nt, synthetic construct
  source 1..52: mol_type = other RNA
ctgtggagcgccttgacagcagccatgggagggccgccccctacctcagtga

SEQ ID NO: 4900 - RNA, 100 nt, synthetic construct
  source 1..100: mol_type = other RNA
tggccgtgtagtgctacccagcgctggctgcctcctcagcattgcaattcctctcccatctgggcaccagtcagctaccctggtgggaatctgggtagcc

SEQ ID NO: 4901 - RNA, 99 nt, synthetic construct
  source 1..99: mol_type = other RNA
ggccgtgtagtgctacccagcgctggctgcctcctcagcattgcaattcctctcccatctgggcaccagtcagctaccctggtgggaatctgggtagcc

SEQ ID NO: 4902 - RNA, 54 nt, synthetic construct
  source 1..54: mol_type = other RNA
tcctgaggagcgccttgacagcagccatgggagggccgccccctacctcagtga

SEQ ID NO: 4903 - RNA, 35 nt, synthetic construct
  source 1..35: mol_type = other RNA
ctgaggagcgccttgacagcagccatgggagggcc

SEQ ID NO: 4904 - RNA, 52 nt, synthetic construct
  source 1..52: mol_type = other RNA
ctgcggagcgccttgacagcagccatgggagggccgccccctacctcagtga

SEQ ID NO: 4905 - DNA, 21 bp, synthetic construct
  source 1..21: mol_type = other DNA
gactggaagcgatgacaatct

SEQ ID NO: 4906 - RNA, 21 nt, synthetic construct
  source 1..21: mol_type = other RNA
gactggaagcgatgacaatct

SEQ ID NO: 4907 - DNA, 21 bp, synthetic construct
  source 1..21: mol_type = other DNA
tttgtcatcgcttccagtctt

SEQ ID NO: 4908 - RNA, 21 nt, synthetic construct
  source 1..21: mol_type = other RNA
tttgtcatcgcttccagtctt

SEQ ID NO: 4909 - DNA, 21 bp, synthetic construct
  source 1..21: mol_type = other DNA
cttccgcgagaacgccaatct

SEQ ID NO: 4910 - RNA, 21 nt, synthetic construct
  source 1..21: mol_type = other RNA
cttccgcgagaacgccaatct

SEQ ID NO: 4911 - DNA, 21 bp, synthetic construct
  source 1..21: mol_type = other DNA
tttggcgttctcgcggaagtt

SEQ ID NO: 4912 - RNA, 21 nt, synthetic construct
  source 1..21: mol_type = other RNA
tttggcgttctcgcggaagtt

SEQ ID NO: 4913 - DNA, 21 bp, synthetic construct
  source 1..21: mol_type = other DNA
gcatcgacatggtagacttct

SEQ ID NO: 4914 - RNA, 21 nt, synthetic construct
  source 1..21: mol_type = other RNA
gcatcgacatggtagacttct

SEQ ID NO: 4915 - DNA, 21 bp, synthetic construct
  source 1..21: mol_type = other DNA
tagtctaccatgtcgatgctt

SEQ ID NO: 4916 - RNA, 21 nt, synthetic construct
  source 1..21: mol_type = other RNA
tagtctaccatgtcgatgctt

SEQ ID NO: 4917 - DNA, 21 bp, synthetic construct
  source 1..21: mol_type = other DNA
gctcctcgcagttcggtttct

SEQ ID NO: 4918 - RNA, 21 nt, synthetic construct
  source 1..21: mol_type = other RNA
gctcctcgcagttcggtttct

SEQ ID NO: 4919 - DNA, 21 bp, synthetic construct
  source 1..21: mol_type = other DNA
taaccgaactgcgaggagctt

SEQ ID NO: 4920 - RNA, 21 nt, synthetic construct
  source 1..21: mol_type = other RNA
taaccgaactgcgaggagctt

SEQ ID NO: 4921 - DNA, 21 bp, synthetic construct
  source 1..21: mol_type = other DNA
ggctttggctcgggactttct

SEQ ID NO: 4922 - RNA, 21 nt, synthetic construct
  source 1..21: mol_type = other RNA
ggctttggctcgggactttct

SEQ ID NO: 4923 - DNA, 21 bp, synthetic construct
  source 1..21: mol_type = other DNA
taagtcccgagccaaagcctt

SEQ ID NO: 4924 - RNA, 21 nt, synthetic construct
  source 1..21: mol_type = other RNA
taagtcccgagccaaagcctt

SEQ ID NO: 4925 - DNA, 21 bp, synthetic construct
  source 1..21: mol_type = other DNA
gactggaagcgatgacaaccc

SEQ ID NO: 4926 - RNA, 21 nt, synthetic construct
  source 1..21: mol_type = other RNA
gactggaagcgatgacaaccc

SEQ ID NO: 4927 - DNA, 21 bp, synthetic construct
  source 1..21: mol_type = other DNA
  misc_feature 1..19: note = RNA
  misc_feature 20..21: note = DNA
taccctaaaccatgatctttt

SEQ ID NO: 4928 - DNA, 21 bp, synthetic construct
  source 1..21: mol_type = other DNA
  misc_feature 1..19: note = RNA
  misc_feature 20..21: note = DNA
tccacaagggggagatccctt

SEQ ID NO: 4929 - DNA, 21 bp, synthetic construct
  source 1..21: mol_type = other DNA
cttccgcgagaacgccaaccc

SEQ ID NO: 4930 - RNA, 21 nt, synthetic construct
  source 1..21: mol_type = other RNA
cttccgcgagaacgccaaccc

SEQ ID NO: 4931 - DNA, 21 bp, synthetic construct
  source 1..21: mol_type = other DNA
  misc_feature 1..19: note = RNA
  misc_feature 20..21: note = DNA
tctatcttacacattcctctt

SEQ ID NO: 4932 - DNA, 21 bp, synthetic construct
  source 1..21: mol_type = other DNA
  misc_feature 1..19: note = RNA
  misc_feature 20..21: note = DNA
tatcaccctaaaccatgattt

SEQ ID NO: 4933 - DNA, 21 bp, synthetic construct
  source 1..21: mol_type = other DNA
gcatcgacatggtagactccc

SEQ ID NO: 4934 - RNA, 21 nt, synthetic construct
  source 1..21: mol_type = other RNA
gcatcgacatggtagactccc

SEQ ID NO: 4935 - DNA, 21 bp, synthetic construct
  source 1..21: mol_type = other DNA
  misc_feature 1..19: note = RNA
  misc_feature 20..21: note = DNA
ttctaccatgtcgatgctgtt

SEQ ID NO: 4936 - DNA, 21 bp, synthetic construct
  source 1..21: mol_type = other DNA
  misc_feature 1..19: note = RNA
  misc_feature 20..21: note = DNA
ttattcctacgcctgcacctt

SEQ ID NO: 4937 - DNA, 21 bp, synthetic construct
  source 1..21: mol_type = other DNA
gctcctcgcagttcggttccc

SEQ ID NO: 4938 - RNA, 21 nt, synthetic construct
  source 1..21: mol_type = other RNA
gctcctcgcagttcggttccc

SEQ ID NO: 4939 - DNA, 21 bp, synthetic construct
  source 1..21: mol_type = other DNA
  misc_feature 1..19: note = RNA
  misc_feature 20..21: note = DNA
tactatcttacacattccttt

SEQ ID NO: 4940 - DNA, 21 bp, synthetic construct
  source 1..21: mol_type = other DNA
  misc_feature 1..19: note = RNA
  misc_feature 20..21: note = DNA
ttgatcaccctaaaccatgtt

SEQ ID NO: 4941 - DNA, 21 bp, synthetic construct
  source 1..21: mol_type = other DNA
ggctttggctcgggacttccc

SEQ ID NO: 4942 - RNA, 21 nt, synthetic construct
  source 1..21: mol_type = other RNA
ggctttggctcgggacttccc

SEQ ID NO: 4943 - DNA, 21 bp, synthetic construct
  source 1..21: mol_type = other DNA
  misc_feature 1..19: note = RNA
  misc_feature 20..21: note = DNA
tgacggcgacttgggtggatt

SEQ ID NO: 4944 - DNA, 21 bp, synthetic construct
  source 1..21: mol_type = other DNA
  misc_feature 1..19: note = RNA
  misc_feature 20..21: note = DNA
taaccagggtcattactgatt

SEQ ID NO: 4945 - DNA, 21 bp, synthetic construct
  source 1..21: mol_type = other DNA
gactggaagcgatgacaaacc

SEQ ID NO: 4946 - RNA, 21 nt, synthetic construct
  source 1..21: mol_type = other RNA
gactggaagcgatgacaaacc

SEQ ID NO: 4947 - DNA, 21 bp, synthetic construct
  source 1..21: mol_type = other DNA
  misc_feature 1..19: note = RNA
  misc_feature 20..21: note = DNA
tttagccctaaagtcccagtt

SEQ ID NO: 4948 - DNA, 21 bp, synthetic construct
  source 1..21: mol_type = other DNA
  misc_feature 1..19: note = RNA
  misc_feature 20..21: note = DNA
ttccatattcctacgcctgtt

SEQ ID NO: 4949 - DNA, 21 bp, synthetic construct
  source 1..21: mol_type = other DNA
cttccgcgagaacgccaaacc

SEQ ID NO: 4950 - RNA, 21 nt, synthetic construct
  source 1..21: mol_type = other RNA
cttccgcgagaacgccaaacc

SEQ ID NO: 4951 - DNA, 21 bp, synthetic construct
  source 1..21: mol_type = other DNA
  misc_feature 1..19: note = RNA
  misc_feature 20..21: note = DNA
tccatattcctacgcctgctt

SEQ ID NO: 4952 - DNA, 21 bp, synthetic construct
  source 1..21: mol_type = other DNA
  misc_feature 1..19: note = RNA
  misc_feature 20..21: note = DNA
tcgccccgacctcgtggcttt

SEQ ID NO: 4953 - DNA, 21 bp, synthetic construct
  source 1..21: mol_type = other DNA
gcatcgacatggtagactacc

SEQ ID NO: 4954 - RNA, 21 nt, synthetic construct
  source 1..21: mol_type = other RNA
gcatcgacatggtagactacc

SEQ ID NO: 4955 - DNA, 21 bp, synthetic construct
  source 1..21: mol_type = other DNA
  misc_feature 1..19: note = RNA
  misc_feature 20..21: note = DNA
ttcttagggaggcatgatttt

SEQ ID NO: 4956 - DNA, 21 bp, synthetic construct
  source 1..21: mol_type = other DNA
  misc_feature 1..19: note = RNA
  misc_feature 20..21: note = DNA
tagaggtgccaacggcttatt

SEQ ID NO: 4957 - DNA, 21 bp, synthetic construct
  source 1..21: mol_type = other DNA
gctcctcgcagttcggttgcc

SEQ ID NO: 4958 - RNA, 21 nt, synthetic construct
  source 1..21: mol_type = other RNA
gctcctcgcagttcggttgcc

SEQ ID NO: 4959 - DNA, 21 bp, synthetic construct
  source 1..21: mol_type = other DNA
  misc_feature 1..19: note = RNA
  misc_feature 20..21: note = DNA
tcgagtctaccatgtcgattt

SEQ ID NO: 4960 - DNA, 21 bp, synthetic construct
  source 1..21: mol_type = other DNA
  misc_feature 1..19: note = RNA
  misc_feature 20..21: note = DNA
tcctcagaattaccgaagatt

SEQ ID NO: 4961 - DNA, 21 bp, synthetic construct
  source 1..21: mol_type = other DNA
ggctttggctcgggacttacc

SEQ ID NO: 4962 - RNA, 21 nt, synthetic construct
  source 1..21: mol_type = other RNA
ggctttggctcgggacttacc

SEQ ID NO: 4963 - DNA, 21 bp, synthetic construct
  source 1..21: mol_type = other DNA
  misc_feature 1..19: note = RNA
  misc_feature 20..21: note = DNA
tagacaccactggcgactttt

SEQ ID NO: 4964 - DNA, 21 bp, synthetic construct
  source 1..21: mol_type = other DNA
  misc_feature 1..19: note = RNA
  misc_feature 20..21: note = DNA
tcgtgccttttcaatttattt

SEQ ID NO: 4965 - DNA, 21 bp, synthetic construct
  source 1..21: mol_type = other DNA
gactggaagcgatgacaatcc

SEQ ID NO: 4966 - RNA, 21 nt, synthetic construct
  source 1..21: mol_type = other RNA
gactggaagcgatgacaatcc

SEQ ID NO: 4967 - DNA, 21 bp, synthetic construct
  source 1..21: mol_type = other DNA
  misc_feature 1..19: note = RNA
  misc_feature 20..21: note = DNA
taccccaagggcctctaactt

SEQ ID NO: 4968 - DNA, 21 bp, synthetic construct
  source 1..21: mol_type = other DNA
  misc_feature 1..19: note = RNA
  misc_feature 20..21: note = DNA
tcgctgcgatcccctgatttt

SEQ ID NO: 4969 - DNA, 21 bp, synthetic construct
  source 1..21: mol_type = other DNA
cttccgcgagaacgccaatcc

SEQ ID NO: 4970 - RNA, 21 nt, synthetic construct
  source 1..21: mol_type = other RNA
cttccgcgagaacgccaatcc

SEQ ID NO: 4971 - DNA, 21 bp, synthetic construct
  source 1..21: mol_type = other DNA
  misc_feature 1..19: note = RNA
  misc_feature 20..21: note = DNA
tcccatgttaactatcttatt

SEQ ID NO: 4972 - DNA, 21 bp, synthetic construct
  source 1..21: mol_type = other DNA
  misc_feature 1..19: note = RNA
  misc_feature 20..21: note = DNA
tcatgttaactatcttacatt

SEQ ID NO: 4973 - DNA, 21 bp, synthetic construct
  source 1..21: mol_type = other DNA
gcatcgacatggtagacttcc

SEQ ID NO: 4974 - RNA, 21 nt, synthetic construct
  source 1..21: mol_type = other RNA
gcatcgacatggtagacttcc

SEQ ID NO: 4975 - DNA, 21 bp, synthetic construct
  source 1..21: mol_type = other DNA
  misc_feature 1..19: note = RNA
  misc_feature 20..21: note = DNA
taccaaggacaggcggccgtt

SEQ ID NO: 4976 - DNA, 21 bp, synthetic construct
  source 1..21: mol_type = other DNA
  misc_feature 1..19: note = RNA
  misc_feature 20..21: note = DNA
taaccccaagggcctctaatt

SEQ ID NO: 4977 - DNA, 21 bp, synthetic construct
  source 1..21: mol_type = other DNA
gctcctcgcagttcggtttcc

SEQ ID NO: 4978 - RNA, 21 nt, synthetic construct
  source 1..21: mol_type = other RNA
gctcctcgcagttcggtttcc

SEQ ID NO: 4979 - DNA, 21 bp, synthetic construct
  source 1..21: mol_type = other DNA
  misc_feature 1..19: note = RNA
  misc_feature 20..21: note = DNA
ttgtagccgctgcgatccctt

SEQ ID NO: 4980 - DNA, 21 bp, synthetic construct
  source 1..21: mol_type = other DNA
  misc_feature 1..19: note = RNA
  misc_feature 20..21: note = DNA
tcctcgccccgacctcgtgtt

SEQ ID NO: 4981 - DNA, 21 bp, synthetic construct
  source 1..21: mol_type = other DNA
ggctttggctcgggactttcc

SEQ ID NO: 4982 - RNA, 21 nt, synthetic construct
  source 1..21: mol_type = other RNA
ggctttggctcgggactttcc

SEQ ID NO: 4983 - DNA, 21 bp, synthetic construct
  source 1..21: mol_type = other DNA
  misc_feature 1..19: note = RNA
  misc_feature 20..21: note = DNA
gctttggctcgggacttcctt

SEQ ID NO: 4984 - DNA, 21 bp, synthetic construct
  source 1..21: mol_type = other DNA
  misc_feature 1..19: note = RNA
  misc_feature 20..21: note = DNA
cgacatggtagactcgccctt

SEQ ID NO: 4985 - DNA, 21 bp, synthetic construct
  source 1..21: mol_type = other DNA
gactggaagggatgacaaccc

SEQ ID NO: 4986 - RNA, 21 nt, synthetic construct
  source 1..21: mol_type = other RNA
gactggaagggatgacaaccc

SEQ ID NO: 4987 - DNA, 21 bp, synthetic construct
  source 1..21: mol_type = other DNA
  misc_feature 1..19: note = RNA
  misc_feature 20..21: note = DNA
ctcctcgcagttcggttactt

SEQ ID NO: 4988 - DNA, 21 bp, synthetic construct
  source 1..21: mol_type = other DNA
  misc_feature 1..19: note = RNA
  misc_feature 20..21: note = DNA
ggctttggctcgggacttctt

SEQ ID NO: 4989 - DNA, 21 bp, synthetic construct
  source 1..21: mol_type = other DNA
cttccgcgacaacgccaaccc

SEQ ID NO: 4990 - RNA, 21 nt, synthetic construct
  source 1..21: mol_type = other RNA
cttccgcgacaacgccaaccc

SEQ ID NO: 4991 - DNA, 21 bp, synthetic construct
  source 1..21: mol_type = other DNA
  misc_feature 1..19: note = RNA
  misc_feature 20..21: note = DNA
ggctttggctcgggacttatt

SEQ ID NO: 4992 - DNA, 21 bp, synthetic construct
  source 1..21: mol_type = other DNA
  misc_feature 1..19: note = RNA
  misc_feature 20..21: note = DNA
ggctttggctcgggacttttt

SEQ ID NO: 4993 - DNA, 21 bp, synthetic construct
  source 1..21: mol_type = other DNA
gcatcgacaaggtagactccc

SEQ ID NO: 4994 - RNA, 21 nt, synthetic construct
  source 1..21: mol_type = other RNA
gcatcgacaaggtagactccc

SEQ ID NO: 4995 - DNA, 21 bp, synthetic construct
  source 1..21: mol_type = other DNA
  misc_feature 1..19: note = RNA
  misc_feature 20..21: note = DNA
ggctttggcacgggacttctt

SEQ ID NO: 4996 - DNA, 21 bp, synthetic construct
  source 1..21: mol_type = other DNA
  misc_feature 1..19: note = RNA
  misc_feature 20..21: note = DNA
ggctttggctcgggacttgtt

SEQ ID NO: 4997 - DNA, 21 bp, synthetic construct
  source 1..21: mol_type = other DNA
gctcctcgctgttcggttccc

SEQ ID NO: 4998 - RNA, 21 nt, synthetic construct
  source 1..21: mol_type = other RNA
gctcctcgctgttcggttccc

SEQ ID NO: 4999 - DNA, 21 bp, synthetic construct
  source 1..21: mol_type = other DNA
  misc_feature 1..19: note = RNA
  misc_feature 20..21: note = DNA
gcatcgacatggtagactctt

SEQ ID NO: 5000 - DNA, 21 bp, synthetic construct
  source 1..21: mol_type = other DNA
  misc_feature 1..19: note = RNA
  misc_feature 20..21: note = DNA
gcatcgacatggtagactatt

SEQ ID NO: 5001 - DNA, 21 bp, synthetic construct
  source 1..21: mol_type = other DNA
ggctttggcacgggacttccc

SEQ ID NO: 5002 - RNA, 21 nt, synthetic construct
  source 1..21: mol_type = other RNA
ggctttggcacgggacttccc

SEQ ID NO: 5003 - DNA, 21 bp, synthetic construct
  source 1..21: mol_type = other DNA
  misc_feature 1..19: note = RNA
  misc_feature 20..21: note = DNA
gcatcgacatggtagactttt

SEQ ID NO: 5004 - DNA, 21 bp, synthetic construct
  source 1..21: mol_type = other DNA
  misc_feature 1..19: note = RNA
  misc_feature 20..21: note = DNA
gcatcgacaaggtagactctt

SEQ ID NO: 5005 - DNA, 21 bp, synthetic construct
  source 1..21: mol_type = other DNA
gactggaagcgatgacaagcc

SEQ ID NO: 5006 - RNA, 21 nt, synthetic construct
  source 1..21: mol_type = other RNA
gactggaagcgatgacaagcc

SEQ ID NO: 5007 - DNA, 21 bp, synthetic construct
  source 1..21: mol_type = other DNA
  misc_feature 1..19: note = RNA
  misc_feature 20..21: note = DNA
gcatcgacatggtagactgtt

SEQ ID NO: 5008 - DNA, 21 bp, synthetic construct
  source 1..21: mol_type = other DNA
  misc_feature 1..19: note = RNA
  misc_feature 20..21: note = DNA
tgctcctcgcagttcggtctt

SEQ ID NO: 5009 - DNA, 21 bp, synthetic construct
  source 1..21: mol_type = other DNA
cttccgcgagaacgccaagcc

SEQ ID NO: 5010 - RNA, 21 nt, synthetic construct
  source 1..21: mol_type = other RNA
cttccgcgagaacgccaagcc

SEQ ID NO: 5011 - DNA, 21 bp, synthetic construct
  source 1..21: mol_type = other DNA
  misc_feature 1..19: note = RNA
  misc_feature 20..21: note = DNA
cacccaagtcgccgtcttctt

SEQ ID NO: 5012 - DNA, 21 bp, synthetic construct
  source 1..21: mol_type = other DNA
  misc_feature 1..19: note = RNA
  misc_feature 20..21: note = DNA
cctcgcagttcggttaatctt

SEQ ID NO: 5013 - DNA, 21 bp, synthetic construct
  source 1..21: mol_type = other DNA
gcatcgacatggtagactgcc

SEQ ID NO: 5014 - RNA, 21 nt, synthetic construct
  source 1..21: mol_type = other RNA
gcatcgacatggtagactgcc

SEQ ID NO: 5015 - DNA, 21 bp, synthetic construct
  source 1..21: mol_type = other DNA
  misc_feature 1..19: note = RNA
  misc_feature 20..21: note = DNA
tcctcgcagttcggttaactt

SEQ ID NO: 5016 - DNA, 21 bp, synthetic construct
  source 1..21: mol_type = other DNA
  misc_feature 1..19: note = RNA
  misc_feature 20..21: note = DNA
agctgaccttccgcgagactt

SEQ ID NO: 5017 - DNA, 21 bp, synthetic construct
  source 1..21: mol_type = other DNA
  misc_feature 1..19: note = RNA
  misc_feature 20..21: note = DNA
gactggaagcgatgacaactt

SEQ ID NO: 5018 - DNA, 21 bp, synthetic construct
  source 1..21: mol_type = other DNA
  misc_feature 1..19: note = RNA
  misc_feature 20..21: note = DNA
gactggaagcgatgacaaatt

SEQ ID NO: 5019 - DNA, 21 bp, synthetic construct
  source 1..21: mol_type = other DNA
  misc_feature 1..19: note = RNA
  misc_feature 20..21: note = DNA
gactggaagcgatgacaattt

SEQ ID NO: 5020 - DNA, 21 bp, synthetic construct
  source 1..21: mol_type = other DNA
  misc_feature 1..19: note = RNA
  misc_feature 20..21: note = DNA
gactggaagggatgacaactt

SEQ ID NO: 5021 - DNA, 21 bp, synthetic construct
  source 1..21: mol_type = other DNA
ggctttggctcgggacttgcc

SEQ ID NO: 5022 - RNA, 21 nt, synthetic construct
  source 1..21: mol_type = other RNA
ggctttggctcgggacttgcc

SEQ ID NO: 5023 - DNA, 21 bp, synthetic construct
  source 1..21: mol_type = other DNA
  misc_feature 1..19: note = RNA
  misc_feature 20..21: note = DNA
gactggaagcgatgacaagtt

SEQ ID NO: 5024 - DNA, 6644 bp, Homo sapiens
  source 1..6644: mol_type = genomic DNA
gcagtcaccgccacccaccagctccggcaccaacagcagcgccgctgccaccgcccaccttctgccgccgccaccacagccaccttctcctcctccgctgtcctctcccgtcctcgcctctgtcgactatcaggtgaactttgaaccaggatggctgagccccgccaggagttcgaagtgatggaagatcacgctgggacgtacgggttgggggacaggaaagatcaggggggctacaccatgcaccaagaccaagagggtgacacggacgctggcctgaaagaatctcccctgcagacccccactgaggacggatctgaggaaccgggctctgaaacctctgatgctaagagcactccaacagcggaagatgtgacagcacccttagtggatgagggagctcccggcaagcaggctgccgcgcagccccacacggagatcccagaaggaaccacagctgaagaagcaggcattggagacacccccagcctggaagacgaagctgctggtcacgtgacccaagagcctgaaagtggtaaggtggtccaggaaggcttcctccgagagccaggccccccaggtctgagccaccagctcatgtccggcatgcctggggctcccctcctgcctgagggccccagagaggccacacgccaaccttcggggacaggacctgaggacacagagggcggccgccacgcccctgagctgctcaagcaccagcttctaggagacctgcaccaggaggggccgccgctgaagggggcagggggcaaagagaggccggggagcaaggaggaggtggatgaagaccgcgacgtcgatgagtcctccccccaagactcccctccctccaaggcctccccagcccaagatgggcggcctccccagacagccgccagagaagccaccagcatcccaggcttcccagcggagggtgccatccccctccctgtggatttcctctccaaagtttccacagagatcccagcctcagagcccgacgggcccagtgtagggcgggccaaagggcaggatgcccccctggagttcacgtttcacgtggaaatcacacccaacgtgcagaaggagcaggcgcactcggaggagcatttgggaagggctgcatttccaggggcccctggagaggggccagaggcccggggcccctctttgggagaggacacaaaagaggctgaccttccagagccctctgaaaagcagcctgctgctgctccgcgggggaagcccgtcagccgggtccctcaactcaaagctcgcatggtcagtaaaagcaaagacgggactggaagcgatgacaaaaaagccaagacatccacacgttcctctgctaaaaccttgaaaaataggccttgccttagccccaaacaccccactcctggtagctcagaccctctgatccaaccctccagccctgctgtgtgcccagagccaccttcctctcctaaatacgtctcttctgtcacttcccgaactggcagttctggagcaaaggagatgaaactcaagggggctgatggtaaaacgaagatcgccacaccgcggggagcagcccctccaggccagaagggccaggccaacgccaccaggattccagcaaaaaccccgcccgctccaaagacaccacccagctctgcgactaagcaagtccagagaagaccaccccctgcagggcccagatctgagagaggtgaacctccaaaatcaggggatcgcagcggctacagcagccccggctccccaggcactcccggcagccgctcccgcaccccgtcccttccaaccccacccacccgggagcccaagaaggtggcagtggtccgtactccacccaagtcgccgtcttccgccaagagccgcctgcagacagcccccgtgcccatgccagacctgaagaatgtcaagtccaagatcggctccactgagaacctgaagcaccagccgggaggcgggaaggtgcagataattaataagaagctggatcttagcaacgtccagtccaagtgtggctcaaaggataatatcaaacacgtcccgggaggcggcagtgtgcaaatagtctacaaaccagttgacctgagcaaggtgacctccaagtgtggctcattaggcaacatccatcataaaccaggaggtggccaggtggaagtaaaatctgagaagcttgacttcaaggacagagtccagtcgaagattgggtccctggacaatatcacccacgtccctggcggaggaaataaaaagattgaaacccacaagctgaccttccgcgagaacgccaaagccaagacagaccacggggcggagatcgtgtacaagtcgccagtggtgtctggggacacgtctccacggcatctcagcaatgtctcctccaccggcagcatcgacatggtagactcgccccagctcgccacgctagctgacgaggtgtctgcctccctggccaagcagggtttgtgatcaggcccctggggcggtcaataattgtggagaggagagaatgagagagtgtggaaaaaaaaagaataatgacccggcccccgccctctgcccccagctgctcctcgcagttcggttaattggttaatcacttaacctgcttttgtcactcggctttggctcgggacttcaaaatcagtgatgggagtaagagcaaatttcatctttccaaattgatgggtgggctagtaataaaatatttaaaaaaaaacattcaaaaacatggccacatccaacatttcctcaggcaattccttttgattcttttttcttccccctccatgtagaagagggagaaggagaggctctgaaagctgcttctgggggatttcaagggactgggggtgccaaccacctctggccctgttgtgggggtgtcacagaggcagtggcagcaacaaaggatttgaaacttggtgtgttcgtggagccacaggcagacgatgtcaaccttgtgtgagtgtgacgggggttggggtggggcgggaggccacgggggaggccgaggcaggggctgggcagaggggagaggaagcacaagaagtgggagtgggagaggaagccacgtgctggagagtagacatccccctccttgccgctgggagagccaaggcctatgccacctgcagcgtctgagcggccgcctgtccttggtggccgggggtgggggcctgctgtgggtcagtgtgccaccctctgcagggcagcctgtgggagaagggacagcgggtaaaaagagaaggcaagctggcaggagggtggcacttcgtggatgacctccttagaaaagactgaccttgatgtcttgagagcgctggcctcttcctccctccctgcagggtagggggcctgagttgaggggcttccctctgctccacagaaaccctgttttattgagttctgaaggttggaactgctgccatgattttggccactttgcagacctgggactttagggctaaccagttctctttgtaaggacttgtgcctcttgggagacgtccacccgtttccaagcctgggccactggcatctctggagtgtgtgggggtctgggaggcaggtcccgagccccctgtccttcccacggccactgcagtcaccccgtctgcgccgctgtgctgttgtctgccgtgagagcccaatcactgcctatacccctcatcacacgtcacaatgtcccgaattcccagcctcaccaccccttctcagtaatgaccctggttggttgcaggaggtacctactccatactgagggtgaaattaagggaaggcaaagtccaggcacaagagtgggaccccagcctctcactctcagttccactcatccaactgggaccctcaccacgaatctcatgatctgattcggttccctgtctcctcctcccgtcacagatgtgagccagggcactgctcagctgtgaccctaggtgtttctgccttgttgacatggagagagccctttcccctgagaaggcctggccccttcctgtgctgagcccacagcagcaggctgggtgtcttggttgtcagtggtggcaccaggatggaagggcaaggcacccagggcaggcccacagtcccgctgtcccccacttgcaccctagcttgtagctgccaacctcccagacagcccagcccgctgctcagctccacatgcatagtatcagccctccacacccgacaaaggggaacacacccccttggaaatggttcttttcccccagtcccagctggaagccatgctgtctgttctgctggagcagctgaacatatacatagatgttgccctgccctccccatctgcaccctgttgagttgtagttggatttgtctgtttatgcttggattcaccagagtgactatgatagtgaaaagaaaaaaaaaaaaaaaaaaggacgcatgtatcttgaaatgcttgtaaagaggtttctaacccaccctcacgaggtgtctctcacccccacactgggactcgtgtggcctgtgtggtgccaccctgctggggcctcccaagttttgaaaggctttcctcagcacctgggacccaacagagaccagcttctagcagctaaggaggccgttcagctgtgacgaaggcctgaagcacaggattaggactgaagcgatgatgtccccttccctacttccccttggggctccctgtgtcagggcacagactaggtcttgtggctggtctggcttgcggcgcgaggatggttctctctggtcatagcccgaagtctcatggcagtcccaaaggaggcttacaactcctgcatcacaagaaaaaggaagccactgccagctggggggatctgcagctcccagaagctccgtgagcctcagccacccctcagactgggttcctctccaagctcgccctctggaggggcagcgcagcctcccaccaagggccctgcgaccacagcagggattgggatgaattgcctgtcctggatctgctctagaggcccaagctgcctgcctgaggaaggatgacttgacaagtcaggagacactgttcccaaagccttgaccagagcacctcagcccgctgaccttgcacaaactccatctgctgccatgagaaaagggaagccgcctttgcaaaacattgctgcctaaagaaactcagcagcctcaggcccaattctgccacttctggtttgggtacagttaaaggcaaccctgagggacttggcagtagaaatccagggcctcccctggggctggcagcttcgtgtgcagctagagctttacctgaaaggaagtctctgggcccagaactctccaccaagagcctccctgccgttcgctgagtcccagcaattctcctaagttgaagggatctgagaaggagaaggaaatgtggggtagatttggtggtggttagagatatgcccccctcattactgccaacagtttcggctgcatttcttcacgcacctcggttcctcttcctgaagttcttgtgccctgctcttcagcaccatgggccttcttatacggaaggctctgggatctcccccttgtggggcaggctcttggggccagcctaagatcatggtttagggtgatcagtgctggcagataaattgaaaaggcacgctggcttgtgatcttaaatgaggacaatccccccagggctgggcactcctcccctcccctcacttctcccacctgcagagccagtgtccttgggtgggctagataggatatactgtatgccggctccttcaagctgctgactcactttatcaatagttccatttaaattgacttcagtggtgagactgtatcctgtttgctattgcttgttgtgctatggggggaggggggaggaatgtgtaagatagttaacatgggcaaagggagatcttggggtgcagcacttaaactgcctcgtaacccttttcatgatttcaaccacatttgctagagggagggagcagccacggagttagaggcccttggggtttctcttttccactgacaggctttcccaggcagctggctagttcattccctccccagccaggtgcaggcgtaggaatatggacatctggttgctttggcctgctgccctctttcaggggtcctaagcccacaatcatgcctccctaagaccttggcatccttccctctaagccgttggcacctctgtgccacctctcacactggctccagacacacagcctgtgcttttggagctgagatcactcgcttcaccctcctcatctttgttctccaagtaaagccacgaggtcggggcgagggcagaggtgatcacctgcgtgtcccatctacagacctgcagcttcataaaacttctgatttctcttcagctttgaaaagggttaccctgggcactggcctagagcctcacctcctaatagacttagccccatgagtttgccatgttgagcaggactatttctggcacttgcaagtcccatgatttcttcggtaattctgagggtggggggagggacatgaaatcatcttagcttagctttctgtctgtgaatgtctatatagtgtattgtgtgttttaacaaatgatttacactgactgttgctgtaaaagtgaatttggaaataaagttattactctgattaaa

SEQ ID NO: 5025 - DNA, 22 bp, unidentified
  source 1..22: mol_type = unassigned DNA
atacatacttctttacattcca

SEQ ID NO: 5026 - DNA, 21 bp, synthetic construct
  source 1..21: mol_type = other DNA
  misc_feature 1..19: note = RNA
  misc_feature 20..21: note = DNA
agctcgcatggtcagtaactt

SEQ ID NO: 5027 - DNA, 158 bp, synthetic construct
  source 1..158: mol_type = other DNA
gtgctgggcggggggcggcgggccctcccgcagaacaccatgcgctcttcggaacctcgcagttcggttaatccctgtgacctggtattaaccgaactgcgaggttctgaggagcgccttgacagcagccatgggagggccgccccctacctcagtga

SEQ ID NO: 5028 - DNA, 158 bp, synthetic construct
  source 1..158: mol_type = other DNA
gtgctgggcggggggcggcgggccctcccgcagaacaccatgcgctcttcggaagctttggctcgggacttcccctgtgacctggtgaagtcccgagccaaagcttctgaggagcgccttgacagcagccatgggagggccgccccctacctcagtga

SEQ ID NO: 5029 - DNA, 158 bp, synthetic construct
  source 1..158: mol_type = other DNA
gtgctgggcggggggcggcgggccctcccgcagaacaccatgcgctcttcggaaagctgaccttccgcgagaccctgtgacctggttctcgcggaaggtcagctttctgaggagcgccttgacagcagccatgggagggccgccccctacctcagtga

SEQ ID NO: 5030 - DNA, 158 bp, synthetic construct
  source 1..158: mol_type = other DNA
gtgctgggcggggggcggcgggccctcccgcagaacaccatgcgctcttcggaagccgtcttccgccaagagccctgtgacctggtctcttggcggaagacggcttctgaggagcgccttgacagcagccatgggagggccgccccctacctcagtga

SEQ ID NO: 5031 - DNA, 158 bp, synthetic construct
  source 1..158: mol_type = other DNA
gtgctgggcggggggcggcgggccctcccgcagaacaccatgcgctcttcggaacctcgcagttcggttaatacctgtgacctggtattaaccgaactgcgaggttctgaggagcgccttgacagcagccatgggagggccgccccctacctcagtga

SEQ ID NO: 5032 - DNA, 158 bp, synthetic construct
  source 1..158: mol_type = other DNA
gtgctgggcggggggcggcgggccctcccgcagaacaccatgcgctcttcggaagctttggctcgggacttcacctgtgacctggtgaagtcccgagccaaagcttctgaggagcgccttgacagcagccatgggagggccgccccctacctcagtga

SEQ ID NO: 5033 - DNA, 158 bp, synthetic construct
  source 1..158: mol_type = other DNA
gtgctgggcggggggcggcgggccctcccgcagaacaccatgcgctcttcggaaagctgaccttccgcgagaacctgtgacctggttctcgcggaaggtcagctttctgaggagcgccttgacagcagccatgggagggccgccccctacctcagtga

SEQ ID NO: 5034 - DNA, 158 bp, synthetic construct
  source 1..158: mol_type = other DNA
gtgctgggcggggggcggcgggccctcccgcagaacaccatgcgctcttcggaagccgtcttccgccaagagacctgtgacctggtctcttggcggaagacggcttctgaggagcgccttgacagcagccatgggagggccgccccctacctcagtga

SEQ ID NO: 5035 - DNA, 158 bp, synthetic construct
  source 1..158: mol_type = other DNA
gtgctgggcggggggcggcgggccctcccgcagaacaccatgcgctcttcggaacctcgcagttcggttaattcctgtgatttggtattaaccgaactgcgaggttctgaggagcgccttgacagcagccatgggagggccgccccctacctcagtga

SEQ ID NO: 5036 - DNA, 158 bp, synthetic construct
  source 1..158: mol_type = other DNA
gtgctgggcggggggcggcgggccctcccgcagaacaccatgcgctcttcggaagctttggctcgggacttctcctgtgatttggtgaagtcccgagccaaagcttctgaggagcgccttgacagcagccatgggagggccgccccctacctcagtga

SEQ ID NO: 5037 - DNA, 158 bp, synthetic construct
  source 1..158: mol_type = other DNA
gtgctgggcggggggcggcgggccctcccgcagaacaccatgcgctcttcggaaagctgaccttccgcgagatcctgtgatttggttctcgcggaaggtcagctttctgaggagcgccttgacagcagccatgggagggccgccccctacctcagtga

SEQ ID NO: 5038 - DNA, 158 bp, synthetic construct
  source 1..158: mol_type = other DNA
gtgctgggcggggggcggcgggccctcccgcagaacaccatgcgctcttcggaagccgtcttccgccaagagtcctgtgatttggtctcttggcggaagacggcttctgaggagcgccttgacagcagccatgggagggccgccccctacctcagtga

SEQ ID NO: 5039 - DNA, 158 bp, synthetic construct
  source 1..158: mol_type = other DNA
gtgctgggcggggggcggcgggccctcccgcagaacaccatgcgctcttcggaacctcgcagtacggttaatccctgtgacctggtattaaccgaactgcgaggttctgtggagcgccttgacagcagccatgggagggccgccccctacctcagtga

SEQ ID NO: 5040 - DNA, 158 bp, synthetic construct
  source 1..158: mol_type = other DNA
gtgctgggcggggggcggcgggccctcccgcagaacaccatgcgctcttcggaagctttggctggggacttcccctgtgacctggtgaagtcccgagccaaagcttctgtggagcgccttgacagcagccatgggagggccgccccctacctcagtga

SEQ ID NO: 5041 - DNA, 158 bp, synthetic construct
  source 1..158: mol_type = other DNA
gtgctgggcggggggcggcgggccctcccgcagaacaccatgcgctcttcggaaagctgacctaccgcgagaccctgtgacctggttctcgcggaaggtcagctttctgtggagcgccttgacagcagccatgggagggccgccccctacctcagtga

SEQ ID NO: 5042 - DNA, 158 bp, synthetic construct
  source 1..158: mol_type = other DNA
gtgctgggcggggggcggcgggccctcccgcagaacaccatgcgctcttcggaagccgtcttcggccaagagccctgtgacctggtctcttggcggaagacggcttctgtggagcgccttgacagcagccatgggagggccgccccctacctcagtga

SEQ ID NO: 5043 - DNA, 158 bp, synthetic construct
  source 1..158: mol_type = other DNA
gtgctgggcggggggcggcgggccctcccgcagaacaccatgcgctcttcggaacctcgcagttcggttaatgcctgtgacctggtattaaccgaactgcgaggttctgtggagcgccttgacagcagccatgggagggccgccccctacctcagtga

SEQ ID NO: 5044 - DNA, 158 bp, synthetic construct
  source 1..158: mol_type = other DNA
gtgctgggcggggggcggcgggccctcccgcagaacaccatgcgctcttcggaagctttggctcgggacttcgcctgtgacctggtgaagtcccgagccaaagcttctgtggagcgccttgacagcagccatgggagggccgccccctacctcagtga

SEQ ID NO: 5045 - DNA, 158 bp, synthetic construct
  source 1..158: mol_type = other DNA
gtgctgggcggggggcggcgggccctcccgcagaacaccatgcgctcttcggaaagctgaccttccgcgagagcctgtgacctggttctcgcggaaggtcagctttctgtggagcgccttgacagcagccatgggagggccgccccctacctcagtga

SEQ ID NO: 5046 - DNA, 158 bp, synthetic construct
  source 1..158: mol_type = other DNA
gtgctgggcggggggcggcgggccctcccgcagaacaccatgcgctcttcggaagccgtcttccgccaagaggcctgtgacctggtctcttggcggaagacggcttctgtggagcgccttgacagcagccatgggagggccgccccctacctcagtga

SEQ ID NO: 5047 - DNA, 260 bp, synthetic construct
  source 1..260: mol_type = other DNA
gaagcaaagaaggggcagagggagcccgtgagctgagtgggccagggactgggagaaggagtgaggaggcagggccggcatgcctctgctgctggccagacctcgcagttcggttaattctgtctgcacctgtcactagtattaaccgaactgcgaggtttggccgtgtagtgctacccagcgctggctgcctcctcagcattgcaattcctctcccatctgggcaccagtcagctaccctggtgggaatctgggtagcc

SEQ ID NO: 5048 - DNA, 260 bp, synthetic construct
  source 1..260: mol_type = other DNA
gaagcaaagaaggggcagagggagcccgtgagctgagtgggccagggactgggagaaggagtgaggaggcagggccggcatgcctctgctgctggccagagctttggctcgggacttctctgtctgcacctgtcactagtgaagtcccgagccaaagctttggccgtgtagtgctacccagcgctggctgcctcctcagcattgcaattcctctcccatctgggcaccagtcagctaccctggtgggaatctgggtagcc

SEQ ID NO: 5049 - DNA, 260 bp, synthetic construct
  source 1..260: mol_type = other DNA
gaagcaaagaaggggcagagggagcccgtgagctgagtgggccagggactgggagaaggagtgaggaggcagggccggcatgcctctgctgctggccagaagctgaccttccgcgagatctgtctgcacctgtcactagttctcgcggaaggtcagcttttggccgtgtagtgctacccagcgctggctgcctcctcagcattgcaattcctctcccatctgggcaccagtcagctaccctggtgggaatctgggtagcc

SEQ ID NO: 5050 - DNA, 260 bp, synthetic construct
  source 1..260: mol_type = other DNA
gaagcaaagaaggggcagagggagcccgtgagctgagtgggccagggactgggagaaggagtgaggaggcagggccggcatgcctctgctgctggccagagccgtcttccgccaagagtctgtctgcacctgtcactagtctcttggcggaagacggctttggccgtgtagtgctacccagcgctggctgcctcctcagcattgcaattcctctcccatctgggcaccagtcagctaccctggtgggaatctgggtagcc

SEQ ID NO: 5051 - DNA, 19 bp, synthetic construct
  source 1..19: mol_type = other DNA
cctcgcagttcggttaatt

SEQ ID NO: 5052 - RNA, 19 nt, synthetic construct
  source 1..19: mol_type = other RNA
cctcgcagttcggttaatt

SEQ ID NO: 5053 - DNA, 21 bp, synthetic construct
  source 1..21: mol_type = other DNA
cctcgcagttcggttaattct

SEQ ID NO: 5054 - RNA, 21 nt, synthetic construct
  source 1..21: mol_type = other RNA
cctcgcagttcggttaattct

SEQ ID NO: 5055 - DNA, 19 bp, synthetic construct
  source 1..19: mol_type = other DNA
tattaaccgaactgcgagg

SEQ ID NO: 5056 - DNA, 21 bp, synthetic construct
  source 1..21: mol_type = other DNA
tattaaccgaactgcgaggtt

SEQ ID NO: 5057 - RNA, 21 nt, synthetic construct
  source 1..21: mol_type = other RNA
tattaaccgaactgcgaggtt

SEQ ID NO: 5058 - DNA, 19 bp, synthetic construct
  source 1..19: mol_type = other DNA
cctcgcagttcggttaatc

SEQ ID NO: 5059 - DNA, 21 bp, synthetic construct
  source 1..21: mol_type = other DNA
cctcgcagttcggttaatccc

SEQ ID NO: 5060 - RNA, 21 nt, synthetic construct
  source 1..21: mol_type = other RNA
cctcgcagttcggttaatccc

SEQ ID NO: 5061 - DNA, 19 bp, synthetic construct
  source 1..19: mol_type = other DNA
cctcgcagttcggttaata

SEQ ID NO: 5062 - RNA, 19 nt, synthetic construct
  source 1..19: mol_type = other RNA
cctcgcagttcggttaata

SEQ ID NO: 5063 - DNA, 21 bp, synthetic construct
  source 1..21: mol_type = other DNA
cctcgcagttcggttaatacc

SEQ ID NO: 5064 - RNA, 21 nt, synthetic construct
  source 1..21: mol_type = other RNA
cctcgcagttcggttaatacc

SEQ ID NO: 5065 - DNA, 21 bp, synthetic construct
  source 1..21: mol_type = other DNA
cctcgcagttcggttaattcc

SEQ ID NO: 5066 - RNA, 21 nt, synthetic construct
  source 1..21: mol_type = other RNA
cctcgcagttcggttaattcc

SEQ ID NO: 5067 - DNA, 19 bp, synthetic construct
  source 1..19: mol_type = other DNA
cctcgcagtacggttaatc

SEQ ID NO: 5068 - RNA, 19 nt, synthetic construct
  source 1..19: mol_type = other RNA
cctcgcagtacggttaatc

SEQ ID NO: 5069 - DNA, 21 bp, synthetic construct
  source 1..21: mol_type = other DNA
cctcgcagtacggttaatccc

SEQ ID NO: 5070 - RNA, 21 nt, synthetic construct
  source 1..21: mol_type = other RNA
cctcgcagtacggttaatccc

SEQ ID NO: 5071 - DNA, 19 bp, synthetic construct
  source 1..19: mol_type = other DNA
cctcgcagttcggttaatg

SEQ ID NO: 5072 - RNA, 19 nt, synthetic construct
  source 1..19: mol_type = other RNA
cctcgcagttcggttaatg

SEQ ID NO: 5073 - DNA, 21 bp, synthetic construct
  source 1..21: mol_type = other DNA
cctcgcagttcggttaatgcc

SEQ ID NO: 5074 - RNA, 21 nt, synthetic construct
  source 1..21: mol_type = other RNA
cctcgcagttcggttaatgcc

SEQ ID NO: 5075 - DNA, 19 bp, synthetic construct
  source 1..19: mol_type = other DNA
gctttggctcgggacttcc

SEQ ID NO: 5076 - DNA, 21 bp, synthetic construct
  source 1..21: mol_type = other DNA
gctttggctcgggacttcccc

SEQ ID NO: 5077 - RNA, 21 nt, synthetic construct
  source 1..21: mol_type = other RNA
gctttggctcgggacttcccc

SEQ ID NO: 5078 - DNA, 19 bp, synthetic construct
  source 1..19: mol_type = other DNA
tgaagtcccgagccaaagc

SEQ ID NO: 5079 - DNA, 21 bp, synthetic construct
  source 1..21: mol_type = other DNA
tgaagtcccgagccaaagctt

SEQ ID NO: 5080 - RNA, 21 nt, synthetic construct
  source 1..21: mol_type = other RNA
tgaagtcccgagccaaagctt

SEQ ID NO: 5081 - DNA, 19 bp, synthetic construct
  source 1..19: mol_type = other DNA
gctttggctcgggacttca

SEQ ID NO: 5082 - RNA, 19 nt, synthetic construct
  source 1..19: mol_type = other RNA
gctttggctcgggacttca

SEQ ID NO: 5083 - DNA, 21 bp, synthetic construct
  source 1..21: mol_type = other DNA
gctttggctcgggacttcacc

SEQ ID NO: 5084 - RNA, 21 nt, synthetic construct
  source 1..21: mol_type = other RNA
gctttggctcgggacttcacc

SEQ ID NO: 5085 - DNA, 19 bp, synthetic construct
  source 1..19: mol_type = other DNA
gctttggctcgggacttct

SEQ ID NO: 5086 - RNA, 19 nt, synthetic construct
  source 1..19: mol_type = other RNA
gctttggctcgggacttct

SEQ ID NO: 5087 - DNA, 21 bp, synthetic construct
  source 1..21: mol_type = other DNA
gctttggctcgggacttctcc

SEQ ID NO: 5088 - RNA, 21 nt, synthetic construct
  source 1..21: mol_type = other RNA
gctttggctcgggacttctcc

SEQ ID NO: 5089 - DNA, 19 bp, synthetic construct
  source 1..19: mol_type = other DNA
gctttggctggggacttcc

SEQ ID NO: 5090 - RNA, 19 nt, synthetic construct
  source 1..19: mol_type = other RNA
gctttggctggggacttcc

SEQ ID NO: 5091 - DNA, 21 bp, synthetic construct
  source 1..21: mol_type = other DNA
gctttggctggggacttcccc

SEQ ID NO: 5092 - RNA, 21 nt, synthetic construct
  source 1..21: mol_type = other RNA
gctttggctggggacttcccc

SEQ ID NO: 5093 - DNA, 19 bp, synthetic construct
  source 1..19: mol_type = other DNA
gctttggctcgggacttcg

SEQ ID NO: 5094 - RNA, 19 nt, synthetic construct
  source 1..19: mol_type = other RNA
gctttggctcgggacttcg

SEQ ID NO: 5095 - DNA, 21 bp, synthetic construct
  source 1..21: mol_type = other DNA
gctttggctcgggacttcgcc

SEQ ID NO: 5096 - RNA, 21 nt, synthetic construct
  source 1..21: mol_type = other RNA
gctttggctcgggacttcgcc

SEQ ID NO: 5097 - DNA, 21 bp, synthetic construct
  source 1..21: mol_type = other DNA
gctttggctcgggacttctct

SEQ ID NO: 5098 - RNA, 21 nt, synthetic construct
  source 1..21: mol_type = other RNA
gctttggctcgggacttctct

SEQ ID NO: 5099 - DNA, 19 bp, synthetic construct
  source 1..19: mol_type = other DNA
agctgaccttccgcgagac

SEQ ID NO: 5100 - DNA, 21 bp, synthetic construct
  source 1..21: mol_type = other DNA
agctgaccttccgcgagaccc

SEQ ID NO: 5101 - RNA, 21 nt, synthetic construct
  source 1..21: mol_type = other RNA
agctgaccttccgcgagaccc

SEQ ID NO: 5102 - DNA, 19 bp, synthetic construct
  source 1..19: mol_type = other DNA
ttctcgcggaaggtcagct

SEQ ID NO: 5103 - DNA, 21 bp, synthetic construct
  source 1..21: mol_type = other DNA
ttctcgcggaaggtcagcttt

SEQ ID NO: 5104 - RNA, 21 nt, synthetic construct
  source 1..21: mol_type = other RNA
ttctcgcggaaggtcagcttt

SEQ ID NO: 5105 - DNA, 19 bp, synthetic construct
  source 1..19: mol_type = other DNA
agctgaccttccgcgagaa

SEQ ID NO: 5106 - RNA, 19 nt, synthetic construct
  source 1..19: mol_type = other RNA
agctgaccttccgcgagaa

SEQ ID NO: 5107 - DNA, 21 bp, synthetic construct
  source 1..21: mol_type = other DNA
agctgaccttccgcgagaacc

SEQ ID NO: 5108 - RNA, 21 nt, synthetic construct
  source 1..21: mol_type = other RNA
agctgaccttccgcgagaacc

SEQ ID NO: 5109 - DNA, 19 bp, synthetic construct
  source 1..19: mol_type = other DNA
agctgaccttccgcgagat

SEQ ID NO: 5110 - RNA, 19 nt, synthetic construct
  source 1..19: mol_type = other RNA
agctgaccttccgcgagat

SEQ ID NO: 5111 - DNA, 21 bp, synthetic construct
  source 1..21: mol_type = other DNA
agctgaccttccgcgagatcc

SEQ ID NO: 5112 - RNA, 21 nt, synthetic construct
  source 1..21: mol_type = other RNA
agctgaccttccgcgagatcc

SEQ ID NO: 5113 - DNA, 19 bp, synthetic construct
  source 1..19: mol_type = other DNA
agctgacctaccgcgagac

SEQ ID NO: 5114 - RNA, 19 nt, synthetic construct
  source 1..19: mol_type = other RNA
agctgacctaccgcgagac

SEQ ID NO: 5115 - DNA, 21 bp, synthetic construct
  source 1..21: mol_type = other DNA
agctgacctaccgcgagaccc

SEQ ID NO: 5116 - RNA, 21 nt, synthetic construct
  source 1..21: mol_type = other RNA
agctgacctaccgcgagaccc

SEQ ID NO: 5117 - DNA, 19 bp, synthetic construct
  source 1..19: mol_type = other DNA
agctgaccttccgcgagag

SEQ ID NO: 5118 - RNA, 19 nt, synthetic construct
  source 1..19: mol_type = other RNA
agctgaccttccgcgagag

SEQ ID NO: 5119 - DNA, 21 bp, synthetic construct
  source 1..21: mol_type = other DNA
agctgaccttccgcgagagcc

SEQ ID NO: 5120 - RNA, 21 nt, synthetic construct
  source 1..21: mol_type = other RNA
agctgaccttccgcgagagcc

SEQ ID NO: 5121 - DNA, 21 bp, synthetic construct
  source 1..21: mol_type = other DNA
agctgaccttccgcgagatct

SEQ ID NO: 5122 - RNA, 21 nt, synthetic construct
  source 1..21: mol_type = other RNA
agctgaccttccgcgagatct

SEQ ID NO: 5123 - DNA, 19 bp, synthetic construct
  source 1..19: mol_type = other DNA
gccgtcttccgccaagagc

SEQ ID NO: 5124 - DNA, 21 bp, synthetic construct
  source 1..21: mol_type = other DNA
gccgtcttccgccaagagccc

SEQ ID NO: 5125 - RNA, 21 nt, synthetic construct
  source 1..21: mol_type = other RNA
gccgtcttccgccaagagccc

SEQ ID NO: 5126 - DNA, 19 bp, synthetic construct
  source 1..19: mol_type = other DNA
tctcttggcggaagacggc

SEQ ID NO: 5127 - DNA, 21 bp, synthetic construct
  source 1..21: mol_type = other DNA
tctcttggcggaagacggctt

SEQ ID NO: 5128 - RNA, 21 nt, synthetic construct
  source 1..21: mol_type = other RNA
tctcttggcggaagacggctt

SEQ ID NO: 5129 - DNA, 19 bp, synthetic construct
  source 1..19: mol_type = other DNA
gccgtcttccgccaagaga

SEQ ID NO: 5130 - RNA, 19 nt, synthetic construct
  source 1..19: mol_type = other RNA
gccgtcttccgccaagaga

SEQ ID NO: 5131 - DNA, 21 bp, synthetic construct
  source 1..21: mol_type = other DNA
gccgtcttccgccaagagacc

SEQ ID NO: 5132 - RNA, 21 nt, synthetic construct
  source 1..21: mol_type = other RNA
gccgtcttccgccaagagacc

SEQ ID NO: 5133 - DNA, 19 bp, synthetic construct
  source 1..19: mol_type = other DNA
gccgtcttccgccaagagt

SEQ ID NO: 5134 - RNA, 19 nt, synthetic construct
  source 1..19: mol_type = other RNA
gccgtcttccgccaagagt

SEQ ID NO: 5135 - DNA, 21 bp, synthetic construct
  source 1..21: mol_type = other DNA
gccgtcttccgccaagagtcc

SEQ ID NO: 5136 - RNA, 21 nt, synthetic construct
  source 1..21: mol_type = other RNA
gccgtcttccgccaagagtcc

SEQ ID NO: 5137 - DNA, 19 bp, synthetic construct
  source 1..19: mol_type = other DNA
gccgtcttcggccaagagc

SEQ ID NO: 5138 - RNA, 19 nt, synthetic construct
  source 1..19: mol_type = other RNA
gccgtcttcggccaagagc

SEQ ID NO: 5139 - DNA, 21 bp, synthetic construct
  source 1..21: mol_type = other DNA
gccgtcttcggccaagagccc

SEQ ID NO: 5140 - RNA, 21 nt, synthetic construct
  source 1..21: mol_type = other RNA
gccgtcttcggccaagagccc

SEQ ID NO: 5141 - DNA, 19 bp, synthetic construct
  source 1..19: mol_type = other DNA
gccgtcttccgccaagagg

SEQ ID NO: 5142 - RNA, 19 nt, synthetic construct
  source 1..19: mol_type = other RNA
gccgtcttccgccaagagg

SEQ ID NO: 5143 - DNA, 21 bp, synthetic construct
  source 1..21: mol_type = other DNA
gccgtcttccgccaagaggcc

SEQ ID NO: 5144 - RNA, 21 nt, synthetic construct
  source 1..21: mol_type = other RNA
gccgtcttccgccaagaggcc

SEQ ID NO: 5145 - DNA, 21 bp, synthetic construct
  source 1..21: mol_type = other DNA
gccgtcttccgccaagagtct

SEQ ID NO: 5146 - RNA, 21 nt, synthetic construct
  source 1..21: mol_type = other RNA
gccgtcttccgccaagagtct

SEQ ID NO: 5147 - protein, 743 aa, synthetic construct
MAADGYLPDWLEDNLSEGIREWWALKPGAPQPKANQQHQDNARGLVLPGYKYLGPGNGLDKGEPVNAADAAALEHDKAYDQQLKAGDNPYLKYNHADAEFQERLKEDTSFGGNLGRAVFQAKKRLLEPLGLVEEAAKTAPGKKRPVEQSPQEPDSSAGIGKSGAQPAKKRLNFGQTGDTESVPDPQPIGEPPAAPSGVGSLTMASGGGAPVADNNEGADGVGSSSGNWHCDSQWLGDRVITTSTRTWALPTYNNHLYKQISNSTSGGSSNDNAYFGYSTPWGYFDFNRFHCHFSPRDWQRLINNNWGFRPKRLNFKLFNIQVKEVTDNNGVKTIANNLTSTVQVFTDSDYQLPYVLGSAHEGCLPPFPADVFMIPQYGYLTLNDGSQAVGRSSFYCLEYFPSQMLRTGNNFQFSYEFENVPFHSSYAHSQSLDRLMNPLIDQYLYYLSKTINGSGQNQQTLKFSVAGPSNMAVQGRNYIPGPSYRQQRVSTTVTQNNNSEFAWPGASSWALNGRNSLMNPGPAMASHKEGEDRFFPLSGSLIFGKQGTGRDNVDADKVMITNEEEIKTTNPVATESYGQVATNHQSDGTGSTTGWAQAQTGWVQNQGILPGMVWQDRDVYLQGPIWAKIPHTDGNFHPSPLMGGFGMKHPPPQILIKNTPVPADPPTAFNKDKLNSFITQYSTGQVSVEIEWELQKENSKRWNPEIQYTSNYYKSNNVEFAVNTEGVYSEPRPIGTRYLTRNL

SEQ ID NO: 5148 - DNA, 2232 bp, synthetic construct
  source 1..2232: mol_type = other DNA
atggctgccgatggttatcttccagattggctcgaggacaaccttagtgaaggaattcgcgagtggtgggctttgaaacctggagcccctcaacccaaggcaaatcaacaacatcaagacaacgctcgaggtcttgtgcttccgggttacaaataccttggacccggcaacggactcgacaagggggagccggtcaacgcagcagacgcggcggccctcgagcacgacaaggcctacgaccagcagctcaaggccggagacaacccgtacctcaagtacaaccacgccgacgccgagttccaggagcggctcaaagaagatacgtcttttgggggcaacctcgggcgagcagtcttccaggccaaaaagaggcttcttgaacctcttggtctggttgaggaagcggctaagacggctcctggaaagaagaggcctgtagagcagtctcctcaggaaccggactcctccgcgggtattggcaaatcgggtgcacagcccgctaaaaagagactcaatttcggtcagactggcgacacagagtcagtcccagaccctcaaccaatcggagaacctcccgcagccccctcaggtgtgggatctcttacaatggcttcaggtggtggcgcaccagtggcagacaataacgaaggtgccgatggagtgggtagttcctcgggaaattggcattgcgattcccaatggctgggggacagagtcatcaccaccagcacccgaacctgggccctgcccacctacaacaatcacctctacaagcaaatctccaacagcacatctggaggatcttcaaatgacaacgcctacttcggctacagcaccccctgggggtattttgacttcaacagattccactgccacttctcaccacgtgactggcagcgactcatcaacaacaactggggattccggcctaagcgactcaacttcaagctcttcaacattcaggtcaaagaggttacggacaacaatggagtcaagaccatcgccaataaccttaccagcacggtccaggtcttcacggactcagactatcagctcccgtacgtgctcgggtcggctcacgagggctgcctcccgccgttcccagcggacgttttcatgattcctcagtacgggtatctgacgcttaatgatggaagccaggccgtgggtcgttcgtccttttactgcctggaatatttcccgtcgcaaatgctaagaacgggtaacaacttccagttcagctacgagtttgagaacgtacctttccatagcagctacgctcacagccaaagcctggaccgactaatgaatccactcatcgaccaatacttgtactatctctcaaagactattaacggttctggacagaatcaacaaacgctaaaattcagtgtggccggacccagcaacatggctgtccagggaagaaactacatacctggacccagctaccgacaacaacgtgtctcaaccactgtgactcaaaacaacaacagcgaatttgcttggcctggagcttcttcttgggctctcaatggacgtaatagcttgatgaatcctggacctgctatggccagccacaaagaaggagaggaccgtttctttcctttgtctggatctttaatttttggcaaacaaggaactggaagagacaacgtggatgcggacaaagtcatgataaccaacgaagaagaaattaaaactactaacccggtagcaacggagtcctatggacaagtggccacaaaccaccagagtgacggaacaggaagcacaacaggatgggcacaggcgcagaccggctgggttcaaaaccaaggaatacttccgggtatggtttggcaggacagagatgtgtacctgcaaggacccatttgggccaaaattcctcacacggacggcaactttcacccttctccgctgatgggagggtttggaatgaagcacccgcctcctcagatcctcatcaaaaacacacctgtacctgccgatcctccaacggccttcaacaaggacaagctgaactctttcatcacccagtattctactggccaagtcagcgtggagatcgagtgggagctgcagaaggaaaacagcaagcggtggaacccggagatccagtacacttccaactattacaagtctaataatgttgaatttgctgttaatactgaaggtgtatatagtgaaccccgccccattggcaccagatacctgactcgtaatctgtaa

SEQ ID NO: 5149 - DNA, 2300 bp, synthetic construct
  source 1..2300: mol_type = other DNA
ctgcgcgctcgctcgctcactgaggccgcccgggcaaagcccgggcgtcgggcgacctttggtcgcccggcctcagtgagcgagcgagcgcgcagagagggagtgtagccatgctctaggaagatcaattcaattcacgcgtcgacattgattattgactagttattaatagtaatcaattacggggtcattagttcatagcccatatatggagttccgcgttacataacttacggtaaatggcccgcctggctgaccgcccaacgacccccgcccattgacgtcaataatgacgtatgttcccatagtaacgccaatagggactttccattgacgtcaatgggtggagtatttacggtaaactgcccacttggcagtacatcaagtgtatcatatgccaagtacgccccctattgacgtcaatgacggtaaatggcccgcctggcattatgcccagtacatgaccttatgggactttcctacttggcagtacatctacgtattagtcatcgctattaccatgtcgaggccacgttctgcttcactctccccatctcccccccctccccacccccaattttgtatttatttattttttaattattttgtgcagcgatgggggcggggggggggggcgcgcgccaggcggggcggggcggggcgaggggcggggcggggcgaggcggagaggtgcggcggcagccaatcagagcggcgcgctccgaaagtttccttttatggcgaggcggcggcggcggcggccctataaaaagcgaagcgcgcggcgggcgggagcaagcttcgtttagtgaaccgtcagatcgcctggagacgccatccacgctgttttgacctccatagaagacaccgggaccgatccagcctccgcggattcgaatcccggccgggaacggtgcattggaacgcggattccccgtgccaagagtgacgtaagtaccgcctatagagtctataggcccacaaaaaatgctttcttcttttaatatacttttttgtttatcttatttctaatactttccctaatctctttctttcagggcaataatgatacaatgtatcatgcctctttgcaccattctaaagaataacagtgataatttctgggttaaggcaatagcaatatttctgcatataaatatttctgcatataaattgtaactgatgtaagaggtttcatattgctaatagcagctacaatccagctaccattctgcttttattttatggttgggataaggctggattattctgagtccaagctaggcccttttgctaatcatgttcatacctcttatcttcctcccacagctcctgggcaacgtgctggtctgtgtgctggcccatcactttggcaaagaattgggattcgaaccggtgaagcaaagaaggggcagagggagcccgtgagctgagtgggccagggactgggagaaggagtgaggaggcagggccggcatgcctctgctgctggccagacctcgcagttcggttaattctgtctgcacctgtcactagtattaaccgaactgcgaggtttggccgtgtagtgctacccagcgctggctgcctcctcagcattgcaattcctctcccatctgggcaccagtcagctaccctggtgggaatctgggtagccctcgaggggtggcatccctgtgacccctccccagtgcctctcctggccctggaagttgccactccagtgcccaccagccttgtcctaataaaattaagttgcatcattttgtctgactaggtgtccttctataatattatggggtggaggggggtggtatggagcaaggggcaagttgggaagacaacctgtagggcctgcggggtctattgggaaccaagctggagtgcagtggcacaatcttggctcactgcaatctccgcctcctgggttcaagcgattctcctgcctcagcctcccgagttgttgggattccaggcatgcatgaccaggctcagctaatttttgtttttttggtagagacggggtttcaccatattggccaggctggtctccaactcctaatctcaggtgatctacccaccttggcctcccaaattgctgggattacaggcgtgaaccactgctcccttccctgtccttatcgatgcctagggttaatcattaactacaaggaacccctagtgatggagttggccactccctctctgcgcgctcgctcgctcactgaggccgggcgaccaaaggtcgcccgacgcccgggctttgcccgggcggcctcagtgagcgagcgagcgcgcag

SEQ ID NO: 5150 - DNA, 2300 bp, synthetic construct
  source 1..2300: mol_type = other DNA
ctgcgcgctcgctcgctcactgaggccgcccgggcaaagcccgggcgtcgggcgacctttggtcgcccggcctcagtgagcgagcgagcgcgcagagagggagtgtagccatgctctaggaagatcaattcaattcacgcgtcgacattgattattgactagttattaatagtaatcaattacggggtcattagttcatagcccatatatggagttccgcgttacataacttacggtaaatggcccgcctggctgaccgcccaacgacccccgcccattgacgtcaataatgacgtatgttcccatagtaacgccaatagggactttccattgacgtcaatgggtggagtatttacggtaaactgcccacttggcagtacatcaagtgtatcatatgccaagtacgccccctattgacgtcaatgacggtaaatggcccgcctggcattatgcccagtacatgaccttatgggactttcctacttggcagtacatctacgtattagtcatcgctattaccatgtcgaggccacgttctgcttcactctccccatctcccccccctccccacccccaattttgtatttatttattttttaattattttgtgcagcgatgggggcggggggggggggcgcgcgccaggcggggcggggcggggcgaggggcggggcggggcgaggcggagaggtgcggcggcagccaatcagagcggcgcgctccgaaagtttccttttatggcgaggcggcggcggcggcggccctataaaaagcgaagcgcgcggcgggcgggagcaagcttcgtttagtgaaccgtcagatcgcctggagacgccatccacgctgttttgacctccatagaagacaccgggaccgatccagcctccgcggattcgaatcccggccgggaacggtgcattggaacgcggattccccgtgccaagagtgacgtaagtaccgcctatagagtctataggcccacaaaaaatgctttcttcttttaatatacttttttgtttatcttatttctaatactttccctaatctctttctttcagggcaataatgatacaatgtatcatgcctctttgcaccattctaaagaataacagtgataatttctgggttaaggcaatagcaatatttctgcatataaatatttctgcatataaattgtaactgatgtaagaggtttcatattgctaatagcagctacaatccagctaccattctgcttttattttatggttgggataaggctggattattctgagtccaagctaggcccttttgctaatcatgttcatacctcttatcttcctcccacagctcctgggcaacgtgctggtctgtgtgctggcccatcactttggcaaagaattgggattcgaaccggtgaagcaaagaaggggcagagggagcccgtgagctgagtgggccagggactgggagaaggagtgaggaggcagggccggcatgcctctgctgctggccagagctttggctcgggacttctctgtctgcacctgtcactagtgaagtcccgagccaaagctttggccgtgtagtgctacccagcgctggctgcctcctcagcattgcaattcctctcccatctgggcaccagtcagctaccctggtgggaatctgggtagccctcgaggggtggcatccctgtgacccctccccagtgcctctcctggccctggaagttgccactccagtgcccaccagccttgtcctaataaaattaagttgcatcattttgtctgactaggtgtccttctataatattatggggtggaggggggtggtatggagcaaggggcaagttgggaagacaacctgtagggcctgcggggtctattgggaaccaagctggagtgcagtggcacaatcttggctcactgcaatctccgcctcctgggttcaagcgattctcctgcctcagcctcccgagttgttgggattccaggcatgcatgaccaggctcagctaatttttgtttttttggtagagacggggtttcaccatattggccaggctggtctccaactcctaatctcaggtgatctacccaccttggcctcccaaattgctgggattacaggcgtgaaccactgctcccttccctgtccttatcgatgcctagggttaatcattaactacaaggaacccctagtgatggagttggccactccctctctgcgcgctcgctcgctcactgaggccgggcgaccaaaggtcgcccgacgcccgggctttgcccgggcggcctcagtgagcgagcgagcgcgcag

SEQ ID NO: 5151 - DNA, 2300 bp, synthetic construct
  source 1..2300: mol_type = other DNA
ctgcgcgctcgctcgctcactgaggccgcccgggcaaagcccgggcgtcgggcgacctttggtcgcccggcctcagtgagcgagcgagcgcgcagagagggagtgtagccatgctctaggaagatcaattcaattcacgcgtcgacattgattattgactagttattaatagtaatcaattacggggtcattagttcatagcccatatatggagttccgcgttacataacttacggtaaatggcccgcctggctgaccgcccaacgacccccgcccattgacgtcaataatgacgtatgttcccatagtaacgccaatagggactttccattgacgtcaatgggtggagtatttacggtaaactgcccacttggcagtacatcaagtgtatcatatgccaagtacgccccctattgacgtcaatgacggtaaatggcccgcctggcattatgcccagtacatgaccttatgggactttcctacttggcagtacatctacgtattagtcatcgctattaccatgtcgaggccacgttctgcttcactctccccatctcccccccctccccacccccaattttgtatttatttattttttaattattttgtgcagcgatgggggcggggggggggggcgcgcgccaggcggggcggggcggggcgaggggcggggcggggcgaggcggagaggtgcggcggcagccaatcagagcggcgcgctccgaaagtttccttttatggcgaggcggcggcggcggcggccctataaaaagcgaagcgcgcggcgggcgggagcaagcttcgtttagtgaaccgtcagatcgcctggagacgccatccacgctgttttgacctccatagaagacaccgggaccgatccagcctccgcggattcgaatcccggccgggaacggtgcattggaacgcggattccccgtgccaagagtgacgtaagtaccgcctatagagtctataggcccacaaaaaatgctttcttcttttaatatacttttttgtttatcttatttctaatactttccctaatctctttctttcagggcaataatgatacaatgtatcatgcctctttgcaccattctaaagaataacagtgataatttctgggttaaggcaatagcaatatttctgcatataaatatttctgcatataaattgtaactgatgtaagaggtttcatattgctaatagcagctacaatccagctaccattctgcttttattttatggttgggataaggctggattattctgagtccaagctaggcccttttgctaatcatgttcatacctcttatcttcctcccacagctcctgggcaacgtgctggtctgtgtgctggcccatcactttggcaaagaattgggattcgaaccggtgaagcaaagaaggggcagagggagcccgtgagctgagtgggccagggactgggagaaggagtgaggaggcagggccggcatgcctctgctgctggccagaagctgaccttccgcgagatctgtctgcacctgtcactagttctcgcggaaggtcagcttttggccgtgtagtgctacccagcgctggctgcctcctcagcattgcaattcctctcccatctgggcaccagtcagctaccctggtgggaatctgggtagccctcgaggggtggcatccctgtgacccctccccagtgcctctcctggccctggaagttgccactccagtgcccaccagccttgtcctaataaaattaagttgcatcattttgtctgactaggtgtccttctataatattatggggtggaggggggtggtatggagcaaggggcaagttgggaagacaacctgtagggcctgcggggtctattgggaaccaagctggagtgcagtggcacaatcttggctcactgcaatctccgcctcctgggttcaagcgattctcctgcctcagcctcccgagttgttgggattccaggcatgcatgaccaggctcagctaatttttgtttttttggtagagacggggtttcaccatattggccaggctggtctccaactcctaatctcaggtgatctacccaccttggcctcccaaattgctgggattacaggcgtgaaccactgctcccttccctgtccttatcgatgcctagggttaatcattaactacaaggaacccctagtgatggagttggccactccctctctgcgcgctcgctcgctcactgaggccgggcgaccaaaggtcgcccgacgcccgggctttgcccgggcggcctcagtgagcgagcgagcgcgcag

SEQ ID NO: 5152 - DNA, 2300 bp, synthetic construct
  source 1..2300: mol_type = other DNA
ctgcgcgctcgctcgctcactgaggccgcccgggcaaagcccgggcgtcgggcgacctttggtcgcccggcctcagtgagcgagcgagcgcgcagagagggagtgtagccatgctctaggaagatcaattcaattcacgcgtcgacattgattattgactagttattaatagtaatcaattacggggtcattagttcatagcccatatatggagttccgcgttacataacttacggtaaatggcccgcctggctgaccgcccaacgacccccgcccattgacgtcaataatgacgtatgttcccatagtaacgccaatagggactttccattgacgtcaatgggtggagtatttacggtaaactgcccacttggcagtacatcaagtgtatcatatgccaagtacgccccctattgacgtcaatgacggtaaatggcccgcctggcattatgcccagtacatgaccttatgggactttcctacttggcagtacatctacgtattagtcatcgctattaccatgtcgaggccacgttctgcttcactctccccatctcccccccctccccacccccaattttgtatttatttattttttaattattttgtgcagcgatgggggcggggggggggggcgcgcgccaggcggggcggggcggggcgaggggcggggcggggcgaggcggagaggtgcggcggcagccaatcagagcggcgcgctccgaaagtttccttttatggcgaggcggcggcggcggcggccctataaaaagcgaagcgcgcggcgggcgggagcaagcttcgtttagtgaaccgtcagatcgcctggagacgccatccacgctgttttgacctccatagaagacaccgggaccgatccagcctccgcggattcgaatcccggccgggaacggtgcattggaacgcggattccccgtgccaagagtgacgtaagtaccgcctatagagtctataggcccacaaaaaatgctttcttcttttaatatacttttttgtttatcttatttctaatactttccctaatctctttctttcagggcaataatgatacaatgtatcatgcctctttgcaccattctaaagaataacagtgataatttctgggttaaggcaatagcaatatttctgcatataaatatttctgcatataaattgtaactgatgtaagaggtttcatattgctaatagcagctacaatccagctaccattctgcttttattttatggttgggataaggctggattattctgagtccaagctaggcccttttgctaatcatgttcatacctcttatcttcctcccacagctcctgggcaacgtgctggtctgtgtgctggcccatcactttggcaaagaattgggattcgaaccggtgaagcaaagaaggggcagagggagcccgtgagctgagtgggccagggactgggagaaggagtgaggaggcagggccggcatgcctctgctgctggccagagccgtcttccgccaagagtctgtctgcacctgtcactagtctcttggcggaagacggctttggccgtgtagtgctacccagcgctggctgcctcctcagcattgcaattcctctcccatctgggcaccagtcagctaccctggtgggaatctgggtagccctcgaggggtggcatccctgtgacccctccccagtgcctctcctggccctggaagttgccactccagtgcccaccagccttgtcctaataaaattaagttgcatcattttgtctgactaggtgtccttctataatattatggggtggaggggggtggtatggagcaaggggcaagttgggaagacaacctgtagggcctgcggggtctattgggaaccaagctggagtgcagtggcacaatcttggctcactgcaatctccgcctcctgggttcaagcgattctcctgcctcagcctcccgagttgttgggattccaggcatgcatgaccaggctcagctaatttttgtttttttggtagagacggggtttcaccatattggccaggctggtctccaactcctaatctcaggtgatctacccaccttggcctcccaaattgctgggattacaggcgtgaaccactgctcccttccctgtccttatcgatgcctagggttaatcattaactacaaggaacccctagtgatggagttggccactccctctctgcgcgctcgctcgctcactgaggccgggcgaccaaaggtcgcccgacgcccgggctttgcccgggcggcctcagtgagcgagcgagcgcgcag

SEQ ID NO: 5153 - DNA, 2198 bp, synthetic construct
  source 1..2198: mol_type = other DNA
ctgcgcgctcgctcgctcactgaggccgcccgggcaaagcccgggcgtcgggcgacctttggtcgcccggcctcagtgagcgagcgagcgcgcagagagggagtgtagccatgctctaggaagatcaattcaattcacgcgtcgacattgattattgactagttattaatagtaatcaattacggggtcattagttcatagcccatatatggagttccgcgttacataacttacggtaaatggcccgcctggctgaccgcccaacgacccccgcccattgacgtcaataatgacgtatgttcccatagtaacgccaatagggactttccattgacgtcaatgggtggagtatttacggtaaactgcccacttggcagtacatcaagtgtatcatatgccaagtacgccccctattgacgtcaatgacggtaaatggcccgcctggcattatgcccagtacatgaccttatgggactttcctacttggcagtacatctacgtattagtcatcgctattaccatgtcgaggccacgttctgcttcactctccccatctcccccccctccccacccccaattttgtatttatttattttttaattattttgtgcagcgatgggggcggggggggggggcgcgcgccaggcggggcggggcggggcgaggggcggggcggggcgaggcggagaggtgcggcggcagccaatcagagcggcgcgctccgaaagtttccttttatggcgaggcggcggcggcggcggccctataaaaagcgaagcgcgcggcgggcgggagcaagcttcgtttagtgaaccgtcagatcgcctggagacgccatccacgctgttttgacctccatagaagacaccgggaccgatccagcctccgcggattcgaatcccggccgggaacggtgcattggaacgcggattccccgtgccaagagtgacgtaagtaccgcctatagagtctataggcccacaaaaaatgctttcttcttttaatatacttttttgtttatcttatttctaatactttccctaatctctttctttcagggcaataatgatacaatgtatcatgcctctttgcaccattctaaagaataacagtgataatttctgggttaaggcaatagcaatatttctgcatataaatatttctgcatataaattgtaactgatgtaagaggtttcatattgctaatagcagctacaatccagctaccattctgcttttattttatggttgggataaggctggattattctgagtccaagctaggcccttttgctaatcatgttcatacctcttatcttcctcccacagctcctgggcaacgtgctggtctgtgtgctggcccatcactttggcaaagaattgggattcgaaccggtgtgctgggcggggggcggcgggccctcccgcagaacaccatgcgctcttcggaacctcgcagttcggttaatgcctgtgacctggtattaaccgaactgcgaggttctgtggagcgccttgacagcagccatgggagggccgccccctacctcagtgactcgaggggtggcatccctgtgacccctccccagtgcctctcctggccctggaagttgccactccagtgcccaccagccttgtcctaataaaattaagttgcatcattttgtctgactaggtgtccttctataatattatggggtggaggggggtggtatggagcaaggggcaagttgggaagacaacctgtagggcctgcggggtctattgggaaccaagctggagtgcagtggcacaatcttggctcactgcaatctccgcctcctgggttcaagcgattctcctgcctcagcctcccgagttgttgggattccaggcatgcatgaccaggctcagctaatttttgtttttttggtagagacggggtttcaccatattggccaggctggtctccaactcctaatctcaggtgatctacccaccttggcctcccaaattgctgggattacaggcgtgaaccactgctcccttccctgtccttatcgatgcctagggttaatcattaactacaaggaacccctagtgatggagttggccactccctctctgcgcgctcgctcgctcactgaggccgggcgaccaaaggtcgcccgacgcccgggctttgcccgggcggcctcagtgagcgagcgagcgcgcag

SEQ ID NO: 5154 - DNA, 2198 bp, synthetic construct
  source 1..2198: mol_type = other DNA
ctgcgcgctcgctcgctcactgaggccgcccgggcaaagcccgggcgtcgggcgacctttggtcgcccggcctcagtgagcgagcgagcgcgcagagagggagtgtagccatgctctaggaagatcaattcaattcacgcgtcgacattgattattgactagttattaatagtaatcaattacggggtcattagttcatagcccatatatggagttccgcgttacataacttacggtaaatggcccgcctggctgaccgcccaacgacccccgcccattgacgtcaataatgacgtatgttcccatagtaacgccaatagggactttccattgacgtcaatgggtggagtatttacggtaaactgcccacttggcagtacatcaagtgtatcatatgccaagtacgccccctattgacgtcaatgacggtaaatggcccgcctggcattatgcccagtacatgaccttatgggactttcctacttggcagtacatctacgtattagtcatcgctattaccatgtcgaggccacgttctgcttcactctccccatctcccccccctccccacccccaattttgtatttatttattttttaattattttgtgcagcgatgggggcggggggggggggcgcgcgccaggcggggcggggcggggcgaggggcggggcggggcgaggcggagaggtgcggcggcagccaatcagagcggcgcgctccgaaagtttccttttatggcgaggcggcggcggcggcggccctataaaaagcgaagcgcgcggcgggcgggagcaagcttcgtttagtgaaccgtcagatcgcctggagacgccatccacgctgttttgacctccatagaagacaccgggaccgatccagcctccgcggattcgaatcccggccgggaacggtgcattggaacgcggattccccgtgccaagagtgacgtaagtaccgcctatagagtctataggcccacaaaaaatgctttcttcttttaatatacttttttgtttatcttatttctaatactttccctaatctctttctttcagggcaataatgatacaatgtatcatgcctctttgcaccattctaaagaataacagtgataatttctgggttaaggcaatagcaatatttctgcatataaatatttctgcatataaattgtaactgatgtaagaggtttcatattgctaatagcagctacaatccagctaccattctgcttttattttatggttgggataaggctggattattctgagtccaagctaggcccttttgctaatcatgttcatacctcttatcttcctcccacagctcctgggcaacgtgctggtctgtgtgctggcccatcactttggcaaagaattgggattcgaaccggtgtgctgggcggggggcggcgggccctcccgcagaacaccatgcgctcttcggaagctttggctcgggacttcgcctgtgacctggtgaagtcccgagccaaagcttctgtggagcgccttgacagcagccatgggagggccgccccctacctcagtgactcgaggggtggcatccctgtgacccctccccagtgcctctcctggccctggaagttgccactccagtgcccaccagccttgtcctaataaaattaagttgcatcattttgtctgactaggtgtccttctataatattatggggtggaggggggtggtatggagcaaggggcaagttgggaagacaacctgtagggcctgcggggtctattgggaaccaagctggagtgcagtggcacaatcttggctcactgcaatctccgcctcctgggttcaagcgattctcctgcctcagcctcccgagttgttgggattccaggcatgcatgaccaggctcagctaatttttgtttttttggtagagacggggtttcaccatattggccaggctggtctccaactcctaatctcaggtgatctacccaccttggcctcccaaattgctgggattacaggcgtgaaccactgctcccttccctgtccttatcgatgcctagggttaatcattaactacaaggaacccctagtgatggagttggccactccctctctgcgcgctcgctcgctcactgaggccgggcgaccaaaggtcgcccgacgcccgggctttgcccgggcggcctcagtgagcgagcgagcgcgcag

SEQ ID NO: 5155 - DNA, 2198 bp, synthetic construct
  source 1..2198: mol_type = other DNA
ctgcgcgctcgctcgctcactgaggccgcccgggcaaagcccgggcgtcgggcgacctttggtcgcccggcctcagtgagcgagcgagcgcgcagagagggagtgtagccatgctctaggaagatcaattcaattcacgcgtcgacattgattattgactagttattaatagtaatcaattacggggtcattagttcatagcccatatatggagttccgcgttacataacttacggtaaatggcccgcctggctgaccgcccaacgacccccgcccattgacgtcaataatgacgtatgttcccatagtaacgccaatagggactttccattgacgtcaatgggtggagtatttacggtaaactgcccacttggcagtacatcaagtgtatcatatgccaagtacgccccctattgacgtcaatgacggtaaatggcccgcctggcattatgcccagtacatgaccttatgggactttcctacttggcagtacatctacgtattagtcatcgctattaccatgtcgaggccacgttctgcttcactctccccatctcccccccctccccacccccaattttgtatttatttattttttaattattttgtgcagcgatgggggcggggggggggggcgcgcgccaggcggggcggggcggggcgaggggcggggcggggcgaggcggagaggtgcggcggcagccaatcagagcggcgcgctccgaaagtttccttttatggcgaggcggcggcggcggcggccctataaaaagcgaagcgcgcggcgggcgggagcaagcttcgtttagtgaaccgtcagatcgcctggagacgccatccacgctgttttgacctccatagaagacaccgggaccgatccagcctccgcggattcgaatcccggccgggaacggtgcattggaacgcggattccccgtgccaagagtgacgtaagtaccgcctatagagtctataggcccacaaaaaatgctttcttcttttaatatacttttttgtttatcttatttctaatactttccctaatctctttctttcagggcaataatgatacaatgtatcatgcctctttgcaccattctaaagaataacagtgataatttctgggttaaggcaatagcaatatttctgcatataaatatttctgcatataaattgtaactgatgtaagaggtttcatattgctaatagcagctacaatccagctaccattctgcttttattttatggttgggataaggctggattattctgagtccaagctaggcccttttgctaatcatgttcatacctcttatcttcctcccacagctcctgggcaacgtgctggtctgtgtgctggcccatcactttggcaaagaattgggattcgaaccggtgtgctgggcggggggcggcgggccctcccgcagaacaccatgcgctcttcggaaagctgaccttccgcgagagcctgtgacctggttctcgcggaaggtcagctttctgtggagcgccttgacagcagccatgggagggccgccccctacctcagtgactcgaggggtggcatccctgtgacccctccccagtgcctctcctggccctggaagttgccactccagtgcccaccagccttgtcctaataaaattaagttgcatcattttgtctgactaggtgtccttctataatattatggggtggaggggggtggtatggagcaaggggcaagttgggaagacaacctgtagggcctgcggggtctattgggaaccaagctggagtgcagtggcacaatcttggctcactgcaatctccgcctcctgggttcaagcgattctcctgcctcagcctcccgagttgttgggattccaggcatgcatgaccaggctcagctaatttttgtttttttggtagagacggggtttcaccatattggccaggctggtctccaactcctaatctcaggtgatctacccaccttggcctcccaaattgctgggattacaggcgtgaaccactgctcccttccctgtccttatcgatgcctagggttaatcattaactacaaggaacccctagtgatggagttggccactccctctctgcgcgctcgctcgctcactgaggccgggcgaccaaaggtcgcccgacgcccgggctttgcccgggcggcctcagtgagcgagcgagcgcgcag

SEQ ID NO: 5156 - DNA, 2198 bp, synthetic construct
  source 1..2198: mol_type = other DNA
ctgcgcgctcgctcgctcactgaggccgcccgggcaaagcccgggcgtcgggcgacctttggtcgcccggcctcagtgagcgagcgagcgcgcagagagggagtgtagccatgctctaggaagatcaattcaattcacgcgtcgacattgattattgactagttattaatagtaatcaattacggggtcattagttcatagcccatatatggagttccgcgttacataacttacggtaaatggcccgcctggctgaccgcccaacgacccccgcccattgacgtcaataatgacgtatgttcccatagtaacgccaatagggactttccattgacgtcaatgggtggagtatttacggtaaactgcccacttggcagtacatcaagtgtatcatatgccaagtacgccccctattgacgtcaatgacggtaaatggcccgcctggcattatgcccagtacatgaccttatgggactttcctacttggcagtacatctacgtattagtcatcgctattaccatgtcgaggccacgttctgcttcactctccccatctcccccccctccccacccccaattttgtatttatttattttttaattattttgtgcagcgatgggggcggggggggggggcgcgcgccaggcggggcggggcggggcgaggggcggggcggggcgaggcggagaggtgcggcggcagccaatcagagcggcgcgctccgaaagtttccttttatggcgaggcggcggcggcggcggccctataaaaagcgaagcgcgcggcgggcgggagcaagcttcgtttagtgaaccgtcagatcgcctggagacgccatccacgctgttttgacctccatagaagacaccgggaccgatccagcctccgcggattcgaatcccggccgggaacggtgcattggaacgcggattccccgtgccaagagtgacgtaagtaccgcctatagagtctataggcccacaaaaaatgctttcttcttttaatatacttttttgtttatcttatttctaatactttccctaatctctttctttcagggcaataatgatacaatgtatcatgcctctttgcaccattctaaagaataacagtgataatttctgggttaaggcaatagcaatatttctgcatataaatatttctgcatataaattgtaactgatgtaagaggtttcatattgctaatagcagctacaatccagctaccattctgcttttattttatggttgggataaggctggattattctgagtccaagctaggcccttttgctaatcatgttcatacctcttatcttcctcccacagctcctgggcaacgtgctggtctgtgtgctggcccatcactttggcaaagaattgggattcgaaccggtgtgctgggcggggggcggcgggccctcccgcagaacaccatgcgctcttcggaagccgtcttccgccaagaggcctgtgacctggtctcttggcggaagacggcttctgtggagcgccttgacagcagccatgggagggccgccccctacctcagtgactcgaggggtggcatccctgtgacccctccccagtgcctctcctggccctggaagttgccactccagtgcccaccagccttgtcctaataaaattaagttgcatcattttgtctgactaggtgtccttctataatattatggggtggaggggggtggtatggagcaaggggcaagttgggaagacaacctgtagggcctgcggggtctattgggaaccaagctggagtgcagtggcacaatcttggctcactgcaatctccgcctcctgggttcaagcgattctcctgcctcagcctcccgagttgttgggattccaggcatgcatgaccaggctcagctaatttttgtttttttggtagagacggggtttcaccatattggccaggctggtctccaactcctaatctcaggtgatctacccaccttggcctcccaaattgctgggattacaggcgtgaaccactgctcccttccctgtccttatcgatgcctagggttaatcattaactacaaggaacccctagtgatggagttggccactccctctctgcgcgctcgctcgctcactgaggccgggcgaccaaaggtcgcccgacgcccgggctttgcccgggcggcctcagtgagcgagcgagcgcgcag

SEQ ID NO: 5157 - DNA, 2198 bp, synthetic construct
  source 1..2198: mol_type = other DNA
ctgcgcgctcgctcgctcactgaggccgcccgggcaaagcccgggcgtcgggcgacctttggtcgcccggcctcagtgagcgagcgagcgcgcagagagggagtgtagccatgctctaggaagatcaattcaattcacgcgtcgacattgattattgactagttattaatagtaatcaattacggggtcattagttcatagcccatatatggagttccgcgttacataacttacggtaaatggcccgcctggctgaccgcccaacgacccccgcccattgacgtcaataatgacgtatgttcccatagtaacgccaatagggactttccattgacgtcaatgggtggagtatttacggtaaactgcccacttggcagtacatcaagtgtatcatatgccaagtacgccccctattgacgtcaatgacggtaaatggcccgcctggcattatgcccagtacatgaccttatgggactttcctacttggcagtacatctacgtattagtcatcgctattaccatgtcgaggccacgttctgcttcactctccccatctcccccccctccccacccccaattttgtatttatttattttttaattattttgtgcagcgatgggggcggggggggggggcgcgcgccaggcggggcggggcggggcgaggggcggggcggggcgaggcggagaggtgcggcggcagccaatcagagcggcgcgctccgaaagtttccttttatggcgaggcggcggcggcggcggccctataaaaagcgaagcgcgcggcgggcgggagcaagcttcgtttagtgaaccgtcagatcgcctggagacgccatccacgctgttttgacctccatagaagacaccgggaccgatccagcctccgcggattcgaatcccggccgggaacggtgcattggaacgcggattccccgtgccaagagtgacgtaagtaccgcctatagagtctataggcccacaaaaaatgctttcttcttttaatatacttttttgtttatcttatttctaatactttccctaatctctttctttcagggcaataatgatacaatgtatcatgcctctttgcaccattctaaagaataacagtgataatttctgggttaaggcaatagcaatatttctgcatataaatatttctgcatataaattgtaactgatgtaagaggtttcatattgctaatagcagctacaatccagctaccattctgcttttattttatggttgggataaggctggattattctgagtccaagctaggcccttttgctaatcatgttcatacctcttatcttcctcccacagctcctgggcaacgtgctggtctgtgtgctggcccatcactttggcaaagaattgggattcgaaccggtgtgctgggcggggggcggcgggccctcccgcagaacaccatgcgctcttcggaacctcgcagtacggttaatccctgtgacctggtattaaccgaactgcgaggttctgtggagcgccttgacagcagccatgggagggccgccccctacctcagtgactcgaggggtggcatccctgtgacccctccccagtgcctctcctggccctggaagttgccactccagtgcccaccagccttgtcctaataaaattaagttgcatcattttgtctgactaggtgtccttctataatattatggggtggaggggggtggtatggagcaaggggcaagttgggaagacaacctgtagggcctgcggggtctattgggaaccaagctggagtgcagtggcacaatcttggctcactgcaatctccgcctcctgggttcaagcgattctcctgcctcagcctcccgagttgttgggattccaggcatgcatgaccaggctcagctaatttttgtttttttggtagagacggggtttcaccatattggccaggctggtctccaactcctaatctcaggtgatctacccaccttggcctcccaaattgctgggattacaggcgtgaaccactgctcccttccctgtccttatcgatgcctagggttaatcattaactacaaggaacccctagtgatggagttggccactccctctctgcgcgctcgctcgctcactgaggccgggcgaccaaaggtcgcccgacgcccgggctttgcccgggcggcctcagtgagcgagcgagcgcgcag

SEQ ID NO: 5158 - DNA, 2198 bp, synthetic construct
  source 1..2198: mol_type = other DNA
ctgcgcgctcgctcgctcactgaggccgcccgggcaaagcccgggcgtcgggcgacctttggtcgcccggcctcagtgagcgagcgagcgcgcagagagggagtgtagccatgctctaggaagatcaattcaattcacgcgtcgacattgattattgactagttattaatagtaatcaattacggggtcattagttcatagcccatatatggagttccgcgttacataacttacggtaaatggcccgcctggctgaccgcccaacgacccccgcccattgacgtcaataatgacgtatgttcccatagtaacgccaatagggactttccattgacgtcaatgggtggagtatttacggtaaactgcccacttggcagtacatcaagtgtatcatatgccaagtacgccccctattgacgtcaatgacggtaaatggcccgcctggcattatgcccagtacatgaccttatgggactttcctacttggcagtacatctacgtattagtcatcgctattaccatgtcgaggccacgttctgcttcactctccccatctcccccccctccccacccccaattttgtatttatttattttttaattattttgtgcagcgatgggggcggggggggggggcgcgcgccaggcggggcggggcggggcgaggggcggggcggggcgaggcggagaggtgcggcggcagccaatcagagcggcgcgctccgaaagtttccttttatggcgaggcggcggcggcggcggccctataaaaagcgaagcgcgcggcgggcgggagcaagcttcgtttagtgaaccgtcagatcgcctggagacgccatccacgctgttttgacctccatagaagacaccgggaccgatccagcctccgcggattcgaatcccggccgggaacggtgcattggaacgcggattccccgtgccaagagtgacgtaagtaccgcctatagagtctataggcccacaaaaaatgctttcttcttttaatatacttttttgtttatcttatttctaatactttccctaatctctttctttcagggcaataatgatacaatgtatcatgcctctttgcaccattctaaagaataacagtgataatttctgggttaaggcaatagcaatatttctgcatataaatatttctgcatataaattgtaactgatgtaagaggtttcatattgctaatagcagctacaatccagctaccattctgcttttattttatggttgggataaggctggattattctgagtccaagctaggcccttttgctaatcatgttcatacctcttatcttcctcccacagctcctgggcaacgtgctggtctgtgtgctggcccatcactttggcaaagaattgggattcgaaccggtgtgctgggcggggggcggcgggccctcccgcagaacaccatgcgctcttcggaagctttggctggggacttcccctgtgacctggtgaagtcccgagccaaagcttctgtggagcgccttgacagcagccatgggagggccgccccctacctcagtgactcgaggggtggcatccctgtgacccctccccagtgcctctcctggccctggaagttgccactccagtgcccaccagccttgtcctaataaaattaagttgcatcattttgtctgactaggtgtccttctataatattatggggtggaggggggtggtatggagcaaggggcaagttgggaagacaacctgtagggcctgcggggtctattgggaaccaagctggagtgcagtggcacaatcttggctcactgcaatctccgcctcctgggttcaagcgattctcctgcctcagcctcccgagttgttgggattccaggcatgcatgaccaggctcagctaatttttgtttttttggtagagacggggtttcaccatattggccaggctggtctccaactcctaatctcaggtgatctacccaccttggcctcccaaattgctgggattacaggcgtgaaccactgctcccttccctgtccttatcgatgcctagggttaatcattaactacaaggaacccctagtgatggagttggccactccctctctgcgcgctcgctcgctcactgaggccgggcgaccaaaggtcgcccgacgcccgggctttgcccgggcggcctcagtgagcgagcgagcgcgcag

SEQ ID NO: 5159 - DNA, 2198 bp, synthetic construct
  source 1..2198: mol_type = other DNA
ctgcgcgctcgctcgctcactgaggccgcccgggcaaagcccgggcgtcgggcgacctttggtcgcccggcctcagtgagcgagcgagcgcgcagagagggagtgtagccatgctctaggaagatcaattcaattcacgcgtcgacattgattattgactagttattaatagtaatcaattacggggtcattagttcatagcccatatatggagttccgcgttacataacttacggtaaatggcccgcctggctgaccgcccaacgacccccgcccattgacgtcaataatgacgtatgttcccatagtaacgccaatagggactttccattgacgtcaatgggtggagtatttacggtaaactgcccacttggcagtacatcaagtgtatcatatgccaagtacgccccctattgacgtcaatgacggtaaatggcccgcctggcattatgcccagtacatgaccttatgggactttcctacttggcagtacatctacgtattagtcatcgctattaccatgtcgaggccacgttctgcttcactctccccatctcccccccctccccacccccaattttgtatttatttattttttaattattttgtgcagcgatgggggcggggggggggggcgcgcgccaggcggggcggggcggggcgaggggcggggcggggcgaggcggagaggtgcggcggcagccaatcagagcggcgcgctccgaaagtttccttttatggcgaggcggcggcggcggcggccctataaaaagcgaagcgcgcggcgggcgggagcaagcttcgtttagtgaaccgtcagatcgcctggagacgccatccacgctgttttgacctccatagaagacaccgggaccgatccagcctccgcggattcgaatcccggccgggaacggtgcattggaacgcggattccccgtgccaagagtgacgtaagtaccgcctatagagtctataggcccacaaaaaatgctttcttcttttaatatacttttttgtttatcttatttctaatactttccctaatctctttctttcagggcaataatgatacaatgtatcatgcctctttgcaccattctaaagaataacagtgataatttctgggttaaggcaatagcaatatttctgcatataaatatttctgcatataaattgtaactgatgtaagaggtttcatattgctaatagcagctacaatccagctaccattctgcttttattttatggttgggataaggctggattattctgagtccaagctaggcccttttgctaatcatgttcatacctcttatcttcctcccacagctcctgggcaacgtgctggtctgtgtgctggcccatcactttggcaaagaattgggattcgaaccggtgtgctgggcggggggcggcgggccctcccgcagaacaccatgcgctcttcggaaagctgacctaccgcgagaccctgtgacctggttctcgcggaaggtcagctttctgtggagcgccttgacagcagccatgggagggccgccccctacctcagtgactcgaggggtggcatccctgtgacccctccccagtgcctctcctggccctggaagttgccactccagtgcccaccagccttgtcctaataaaattaagttgcatcattttgtctgactaggtgtccttctataatattatggggtggaggggggtggtatggagcaaggggcaagttgggaagacaacctgtagggcctgcggggtctattgggaaccaagctggagtgcagtggcacaatcttggctcactgcaatctccgcctcctgggttcaagcgattctcctgcctcagcctcccgagttgttgggattccaggcatgcatgaccaggctcagctaatttttgtttttttggtagagacggggtttcaccatattggccaggctggtctccaactcctaatctcaggtgatctacccaccttggcctcccaaattgctgggattacaggcgtgaaccactgctcccttccctgtccttatcgatgcctagggttaatcattaactacaaggaacccctagtgatggagttggccactccctctctgcgcgctcgctcgctcactgaggccgggcgaccaaaggtcgcccgacgcccgggctttgcccgggcggcctcagtgagcgagcgagcgcgcag

SEQ ID NO: 5160 - DNA, 2198 bp, synthetic construct
  source 1..2198: mol_type = other DNA
ctgcgcgctcgctcgctcactgaggccgcccgggcaaagcccgggcgtcgggcgacctttggtcgcccggcctcagtgagcgagcgagcgcgcagagagggagtgtagccatgctctaggaagatcaattcaattcacgcgtcgacattgattattgactagttattaatagtaatcaattacggggtcattagttcatagcccatatatggagttccgcgttacataacttacggtaaatggcccgcctggctgaccgcccaacgacccccgcccattgacgtcaataatgacgtatgttcccatagtaacgccaatagggactttccattgacgtcaatgggtggagtatttacggtaaactgcccacttggcagtacatcaagtgtatcatatgccaagtacgccccctattgacgtcaatgacggtaaatggcccgcctggcattatgcccagtacatgaccttatgggactttcctacttggcagtacatctacgtattagtcatcgctattaccatgtcgaggccacgttctgcttcactctccccatctcccccccctccccacccccaattttgtatttatttattttttaattattttgtgcagcgatgggggcggggggggggggcgcgcgccaggcggggcggggcggggcgaggggcggggcggggcgaggcggagaggtgcggcggcagccaatcagagcggcgcgctccgaaagtttccttttatggcgaggcggcggcggcggcggccctataaaaagcgaagcgcgcggcgggcgggagcaagcttcgtttagtgaaccgtcagatcgcctggagacgccatccacgctgttttgacctccatagaagacaccgggaccgatccagcctccgcggattcgaatcccggccgggaacggtgcattggaacgcggattccccgtgccaagagtgacgtaagtaccgcctatagagtctataggcccacaaaaaatgctttcttcttttaatatacttttttgtttatcttatttctaatactttccctaatctctttctttcagggcaataatgatacaatgtatcatgcctctttgcaccattctaaagaataacagtgataatttctgggttaaggcaatagcaatatttctgcatataaatatttctgcatataaattgtaactgatgtaagaggtttcatattgctaatagcagctacaatccagctaccattctgcttttattttatggttgggataaggctggattattctgagtccaagctaggcccttttgctaatcatgttcatacctcttatcttcctcccacagctcctgggcaacgtgctggtctgtgtgctggcccatcactttggcaaagaattgggattcgaaccggtgtgctgggcggggggcggcgggccctcccgcagaacaccatgcgctcttcggaagccgtcttcggccaagagccctgtgacctggtctcttggcggaagacggcttctgtggagcgccttgacagcagccatgggagggccgccccctacctcagtgactcgaggggtggcatccctgtgacccctccccagtgcctctcctggccctggaagttgccactccagtgcccaccagccttgtcctaataaaattaagttgcatcattttgtctgactaggtgtccttctataatattatggggtggaggggggtggtatggagcaaggggcaagttgggaagacaacctgtagggcctgcggggtctattgggaaccaagctggagtgcagtggcacaatcttggctcactgcaatctccgcctcctgggttcaagcgattctcctgcctcagcctcccgagttgttgggattccaggcatgcatgaccaggctcagctaatttttgtttttttggtagagacggggtttcaccatattggccaggctggtctccaactcctaatctcaggtgatctacccaccttggcctcccaaattgctgggattacaggcgtgaaccactgctcccttccctgtccttatcgatgcctagggttaatcattaactacaaggaacccctagtgatggagttggccactccctctctgcgcgctcgctcgctcactgaggccgggcgaccaaaggtcgcccgacgcccgggctttgcccgggcggcctcagtgagcgagcgagcgcgcag

SEQ ID NO: 5161 - DNA, 2198 bp, synthetic construct
  source 1..2198: mol_type = other DNA
ctgcgcgctcgctcgctcactgaggccgcccgggcaaagcccgggcgtcgggcgacctttggtcgcccggcctcagtgagcgagcgagcgcgcagagagggagtgtagccatgctctaggaagatcaattcaattcacgcgtcgacattgattattgactagttattaatagtaatcaattacggggtcattagttcatagcccatatatggagttccgcgttacataacttacggtaaatggcccgcctggctgaccgcccaacgacccccgcccattgacgtcaataatgacgtatgttcccatagtaacgccaatagggactttccattgacgtcaatgggtggagtatttacggtaaactgcccacttggcagtacatcaagtgtatcatatgccaagtacgccccctattgacgtcaatgacggtaaatggcccgcctggcattatgcccagtacatgaccttatgggactttcctacttggcagtacatctacgtattagtcatcgctattaccatgtcgaggccacgttctgcttcactctccccatctcccccccctccccacccccaattttgtatttatttattttttaattattttgtgcagcgatgggggcggggggggggggcgcgcgccaggcggggcggggcggggcgaggggcggggcggggcgaggcggagaggtgcggcggcagccaatcagagcggcgcgctccgaaagtttccttttatggcgaggcggcggcggcggcggccctataaaaagcgaagcgcgcggcgggcgggagcaagcttcgtttagtgaaccgtcagatcgcctggagacgccatccacgctgttttgacctccatagaagacaccgggaccgatccagcctccgcggattcgaatcccggccgggaacggtgcattggaacgcggattccccgtgccaagagtgacgtaagtaccgcctatagagtctataggcccacaaaaaatgctttcttcttttaatatacttttttgtttatcttatttctaatactttccctaatctctttctttcagggcaataatgatacaatgtatcatgcctctttgcaccattctaaagaataacagtgataatttctgggttaaggcaatagcaatatttctgcatataaatatttctgcatataaattgtaactgatgtaagaggtttcatattgctaatagcagctacaatccagctaccattctgcttttattttatggttgggataaggctggattattctgagtccaagctaggcccttttgctaatcatgttcatacctcttatcttcctcccacagctcctgggcaacgtgctggtctgtgtgctggcccatcactttggcaaagaattgggattcgaaccggtgtgctgggcggggggcggcgggccctcccgcagaacaccatgcgctcttcggaacctcgcagttcggttaattcctgtgatttggtattaaccgaactgcgaggttctgaggagcgccttgacagcagccatgggagggccgccccctacctcagtgactcgaggggtggcatccctgtgacccctccccagtgcctctcctggccctggaagttgccactccagtgcccaccagccttgtcctaataaaattaagttgcatcattttgtctgactaggtgtccttctataatattatggggtggaggggggtggtatggagcaaggggcaagttgggaagacaacctgtagggcctgcggggtctattgggaaccaagctggagtgcagtggcacaatcttggctcactgcaatctccgcctcctgggttcaagcgattctcctgcctcagcctcccgagttgttgggattccaggcatgcatgaccaggctcagctaatttttgtttttttggtagagacggggtttcaccatattggccaggctggtctccaactcctaatctcaggtgatctacccaccttggcctcccaaattgctgggattacaggcgtgaaccactgctcccttccctgtccttatcgatgcctagggttaatcattaactacaaggaacccctagtgatggagttggccactccctctctgcgcgctcgctcgctcactgaggccgggcgaccaaaggtcgcccgacgcccgggctttgcccgggcggcctcagtgagcgagcgagcgcgcag

SEQ ID NO: 5162 - DNA, 2198 bp, synthetic construct
  source 1..2198: mol_type = other DNA
ctgcgcgctcgctcgctcactgaggccgcccgggcaaagcccgggcgtcgggcgacctttggtcgcccggcctcagtgagcgagcgagcgcgcagagagggagtgtagccatgctctaggaagatcaattcaattcacgcgtcgacattgattattgactagttattaatagtaatcaattacggggtcattagttcatagcccatatatggagttccgcgttacataacttacggtaaatggcccgcctggctgaccgcccaacgacccccgcccattgacgtcaataatgacgtatgttcccatagtaacgccaatagggactttccattgacgtcaatgggtggagtatttacggtaaactgcccacttggcagtacatcaagtgtatcatatgccaagtacgccccctattgacgtcaatgacggtaaatggcccgcctggcattatgcccagtacatgaccttatgggactttcctacttggcagtacatctacgtattagtcatcgctattaccatgtcgaggccacgttctgcttcactctccccatctcccccccctccccacccccaattttgtatttatttattttttaattattttgtgcagcgatgggggcggggggggggggcgcgcgccaggcggggcggggcggggcgaggggcggggcggggcgaggcggagaggtgcggcggcagccaatcagagcggcgcgctccgaaagtttccttttatggcgaggcggcggcggcggcggccctataaaaagcgaagcgcgcggcgggcgggagcaagcttcgtttagtgaaccgtcagatcgcctggagacgccatccacgctgttttgacctccatagaagacaccgggaccgatccagcctccgcggattcgaatcccggccgggaacggtgcattggaacgcggattccccgtgccaagagtgacgtaagtaccgcctatagagtctataggcccacaaaaaatgctttcttcttttaatatacttttttgtttatcttatttctaatactttccctaatctctttctttcagggcaataatgatacaatgtatcatgcctctttgcaccattctaaagaataacagtgataatttctgggttaaggcaatagcaatatttctgcatataaatatttctgcatataaattgtaactgatgtaagaggtttcatattgctaatagcagctacaatccagctaccattctgcttttattttatggttgggataaggctggattattctgagtccaagctaggcccttttgctaatcatgttcatacctcttatcttcctcccacagctcctgggcaacgtgctggtctgtgtgctggcccatcactttggcaaagaattgggattcgaaccggtgtgctgggcggggggcggcgggccctcccgcagaacaccatgcgctcttcggaagctttggctcgggacttctcctgtgatttggtgaagtcccgagccaaagcttctgaggagcgccttgacagcagccatgggagggccgccccctacctcagtgactcgaggggtggcatccctgtgacccctccccagtgcctctcctggccctggaagttgccactccagtgcccaccagccttgtcctaataaaattaagttgcatcattttgtctgactaggtgtccttctataatattatggggtggaggggggtggtatggagcaaggggcaagttgggaagacaacctgtagggcctgcggggtctattgggaaccaagctggagtgcagtggcacaatcttggctcactgcaatctccgcctcctgggttcaagcgattctcctgcctcagcctcccgagttgttgggattccaggcatgcatgaccaggctcagctaatttttgtttttttggtagagacggggtttcaccatattggccaggctggtctccaactcctaatctcaggtgatctacccaccttggcctcccaaattgctgggattacaggcgtgaaccactgctcccttccctgtccttatcgatgcctagggttaatcattaactacaaggaacccctagtgatggagttggccactccctctctgcgcgctcgctcgctcactgaggccgggcgaccaaaggtcgcccgacgcccgggctttgcccgggcggcctcagtgagcgagcgagcgcgcag

SEQ ID NO: 5163 - DNA, 2198 bp, synthetic construct
  source 1..2198: mol_type = other DNA
ctgcgcgctcgctcgctcactgaggccgcccgggcaaagcccgggcgtcgggcgacctttggtcgcccggcctcagtgagcgagcgagcgcgcagagagggagtgtagccatgctctaggaagatcaattcaattcacgcgtcgacattgattattgactagttattaatagtaatcaattacggggtcattagttcatagcccatatatggagttccgcgttacataacttacggtaaatggcccgcctggctgaccgcccaacgacccccgcccattgacgtcaataatgacgtatgttcccatagtaacgccaatagggactttccattgacgtcaatgggtggagtatttacggtaaactgcccacttggcagtacatcaagtgtatcatatgccaagtacgccccctattgacgtcaatgacggtaaatggcccgcctggcattatgcccagtacatgaccttatgggactttcctacttggcagtacatctacgtattagtcatcgctattaccatgtcgaggccacgttctgcttcactctccccatctcccccccctccccacccccaattttgtatttatttattttttaattattttgtgcagcgatgggggcggggggggggggcgcgcgccaggcggggcggggcggggcgaggggcggggcggggcgaggcggagaggtgcggcggcagccaatcagagcggcgcgctccgaaagtttccttttatggcgaggcggcggcggcggcggccctataaaaagcgaagcgcgcggcgggcgggagcaagcttcgtttagtgaaccgtcagatcgcctggagacgccatccacgctgttttgacctccatagaagacaccgggaccgatccagcctccgcggattcgaatcccggccgggaacggtgcattggaacgcggattccccgtgccaagagtgacgtaagtaccgcctatagagtctataggcccacaaaaaatgctttcttcttttaatatacttttttgtttatcttatttctaatactttccctaatctctttctttcagggcaataatgatacaatgtatcatgcctctttgcaccattctaaagaataacagtgataatttctgggttaaggcaatagcaatatttctgcatataaatatttctgcatataaattgtaactgatgtaagaggtttcatattgctaatagcagctacaatccagctaccattctgcttttattttatggttgggataaggctggattattctgagtccaagctaggcccttttgctaatcatgttcatacctcttatcttcctcccacagctcctgggcaacgtgctggtctgtgtgctggcccatcactttggcaaagaattgggattcgaaccggtgtgctgggcggggggcggcgggccctcccgcagaacaccatgcgctcttcggaaagctgaccttccgcgagatcctgtgatttggttctcgcggaaggtcagctttctgaggagcgccttgacagcagccatgggagggccgccccctacctcagtgactcgaggggtggcatccctgtgacccctccccagtgcctctcctggccctggaagttgccactccagtgcccaccagccttgtcctaataaaattaagttgcatcattttgtctgactaggtgtccttctataatattatggggtggaggggggtggtatggagcaaggggcaagttgggaagacaacctgtagggcctgcggggtctattgggaaccaagctggagtgcagtggcacaatcttggctcactgcaatctccgcctcctgggttcaagcgattctcctgcctcagcctcccgagttgttgggattccaggcatgcatgaccaggctcagctaatttttgtttttttggtagagacggggtttcaccatattggccaggctggtctccaactcctaatctcaggtgatctacccaccttggcctcccaaattgctgggattacaggcgtgaaccactgctcccttccctgtccttatcgatgcctagggttaatcattaactacaaggaacccctagtgatggagttggccactccctctctgcgcgctcgctcgctcactgaggccgggcgaccaaaggtcgcccgacgcccgggctttgcccgggcggcctcagtgagcgagcgagcgcgcag

SEQ ID NO: 5164 - DNA, 2198 bp, synthetic construct
  source 1..2198: mol_type = other DNA
ctgcgcgctcgctcgctcactgaggccgcccgggcaaagcccgggcgtcgggcgacctttggtcgcccggcctcagtgagcgagcgagcgcgcagagagggagtgtagccatgctctaggaagatcaattcaattcacgcgtcgacattgattattgactagttattaatagtaatcaattacggggtcattagttcatagcccatatatggagttccgcgttacataacttacggtaaatggcccgcctggctgaccgcccaacgacccccgcccattgacgtcaataatgacgtatgttcccatagtaacgccaatagggactttccattgacgtcaatgggtggagtatttacggtaaactgcccacttggcagtacatcaagtgtatcatatgccaagtacgccccctattgacgtcaatgacggtaaatggcccgcctggcattatgcccagtacatgaccttatgggactttcctacttggcagtacatctacgtattagtcatcgctattaccatgtcgaggccacgttctgcttcactctccccatctcccccccctccccacccccaattttgtatttatttattttttaattattttgtgcagcgatgggggcggggggggggggcgcgcgccaggcggggcggggcggggcgaggggcggggcggggcgaggcggagaggtgcggcggcagccaatcagagcggcgcgctccgaaagtttccttttatggcgaggcggcggcggcggcggccctataaaaagcgaagcgcgcggcgggcgggagcaagcttcgtttagtgaaccgtcagatcgcctggagacgccatccacgctgttttgacctccatagaagacaccgggaccgatccagcctccgcggattcgaatcccggccgggaacggtgcattggaacgcggattccccgtgccaagagtgacgtaagtaccgcctatagagtctataggcccacaaaaaatgctttcttcttttaatatacttttttgtttatcttatttctaatactttccctaatctctttctttcagggcaataatgatacaatgtatcatgcctctttgcaccattctaaagaataacagtgataatttctgggttaaggcaatagcaatatttctgcatataaatatttctgcatataaattgtaactgatgtaagaggtttcatattgctaatagcagctacaatccagctaccattctgcttttattttatggttgggataaggctggattattctgagtccaagctaggcccttttgctaatcatgttcatacctcttatcttcctcccacagctcctgggcaacgtgctggtctgtgtgctggcccatcactttggcaaagaattgggattcgaaccggtgtgctgggcggggggcggcgggccctcccgcagaacaccatgcgctcttcggaagccgtcttccgccaagagtcctgtgatttggtctcttggcggaagacggcttctgaggagcgccttgacagcagccatgggagggccgccccctacctcagtgactcgaggggtggcatccctgtgacccctccccagtgcctctcctggccctggaagttgccactccagtgcccaccagccttgtcctaataaaattaagttgcatcattttgtctgactaggtgtccttctataatattatggggtggaggggggtggtatggagcaaggggcaagttgggaagacaacctgtagggcctgcggggtctattgggaaccaagctggagtgcagtggcacaatcttggctcactgcaatctccgcctcctgggttcaagcgattctcctgcctcagcctcccgagttgttgggattccaggcatgcatgaccaggctcagctaatttttgtttttttggtagagacggggtttcaccatattggccaggctggtctccaactcctaatctcaggtgatctacccaccttggcctcccaaattgctgggattacaggcgtgaaccactgctcccttccctgtccttatcgatgcctagggttaatcattaactacaaggaacccctagtgatggagttggccactccctctctgcgcgctcgctcgctcactgaggccgggcgaccaaaggtcgcccgacgcccgggctttgcccgggcggcctcagtgagcgagcgagcgcgcag

SEQ ID NO: 5165 - DNA, 2198 bp, synthetic construct
  source 1..2198: mol_type = other DNA
ctgcgcgctcgctcgctcactgaggccgcccgggcaaagcccgggcgtcgggcgacctttggtcgcccggcctcagtgagcgagcgagcgcgcagagagggagtgtagccatgctctaggaagatcaattcaattcacgcgtcgacattgattattgactagttattaatagtaatcaattacggggtcattagttcatagcccatatatggagttccgcgttacataacttacggtaaatggcccgcctggctgaccgcccaacgacccccgcccattgacgtcaataatgacgtatgttcccatagtaacgccaatagggactttccattgacgtcaatgggtggagtatttacggtaaactgcccacttggcagtacatcaagtgtatcatatgccaagtacgccccctattgacgtcaatgacggtaaatggcccgcctggcattatgcccagtacatgaccttatgggactttcctacttggcagtacatctacgtattagtcatcgctattaccatgtcgaggccacgttctgcttcactctccccatctcccccccctccccacccccaattttgtatttatttattttttaattattttgtgcagcgatgggggcggggggggggggcgcgcgccaggcggggcggggcggggcgaggggcggggcggggcgaggcggagaggtgcggcggcagccaatcagagcggcgcgctccgaaagtttccttttatggcgaggcggcggcggcggcggccctataaaaagcgaagcgcgcggcgggcgggagcaagcttcgtttagtgaaccgtcagatcgcctggagacgccatccacgctgttttgacctccatagaagacaccgggaccgatccagcctccgcggattcgaatcccggccgggaacggtgcattggaacgcggattccccgtgccaagagtgacgtaagtaccgcctatagagtctataggcccacaaaaaatgctttcttcttttaatatacttttttgtttatcttatttctaatactttccctaatctctttctttcagggcaataatgatacaatgtatcatgcctctttgcaccattctaaagaataacagtgataatttctgggttaaggcaatagcaatatttctgcatataaatatttctgcatataaattgtaactgatgtaagaggtttcatattgctaatagcagctacaatccagctaccattctgcttttattttatggttgggataaggctggattattctgagtccaagctaggcccttttgctaatcatgttcatacctcttatcttcctcccacagctcctgggcaacgtgctggtctgtgtgctggcccatcactttggcaaagaattgggattcgaaccggtgtgctgggcggggggcggcgggccctcccgcagaacaccatgcgctcttcggaacctcgcagttcggttaatacctgtgacctggtattaaccgaactgcgaggttctgaggagcgccttgacagcagccatgggagggccgccccctacctcagtgactcgaggggtggcatccctgtgacccctccccagtgcctctcctggccctggaagttgccactccagtgcccaccagccttgtcctaataaaattaagttgcatcattttgtctgactaggtgtccttctataatattatggggtggaggggggtggtatggagcaaggggcaagttgggaagacaacctgtagggcctgcggggtctattgggaaccaagctggagtgcagtggcacaatcttggctcactgcaatctccgcctcctgggttcaagcgattctcctgcctcagcctcccgagttgttgggattccaggcatgcatgaccaggctcagctaatttttgtttttttggtagagacggggtttcaccatattggccaggctggtctccaactcctaatctcaggtgatctacccaccttggcctcccaaattgctgggattacaggcgtgaaccactgctcccttccctgtccttatcgatgcctagggttaatcattaactacaaggaacccctagtgatggagttggccactccctctctgcgcgctcgctcgctcactgaggccgggcgaccaaaggtcgcccgacgcccgggctttgcccgggcggcctcagtgagcgagcgagcgcgcag

SEQ ID NO: 5166 - DNA, 2198 bp, synthetic construct
  source 1..2198: mol_type = other DNA
ctgcgcgctcgctcgctcactgaggccgcccgggcaaagcccgggcgtcgggcgacctttggtcgcccggcctcagtgagcgagcgagcgcgcagagagggagtgtagccatgctctaggaagatcaattcaattcacgcgtcgacattgattattgactagttattaatagtaatcaattacggggtcattagttcatagcccatatatggagttccgcgttacataacttacggtaaatggcccgcctggctgaccgcccaacgacccccgcccattgacgtcaataatgacgtatgttcccatagtaacgccaatagggactttccattgacgtcaatgggtggagtatttacggtaaactgcccacttggcagtacatcaagtgtatcatatgccaagtacgccccctattgacgtcaatgacggtaaatggcccgcctggcattatgcccagtacatgaccttatgggactttcctacttggcagtacatctacgtattagtcatcgctattaccatgtcgaggccacgttctgcttcactctccccatctcccccccctccccacccccaattttgtatttatttattttttaattattttgtgcagcgatgggggcggggggggggggcgcgcgccaggcggggcggggcggggcgaggggcggggcggggcgaggcggagaggtgcggcggcagccaatcagagcggcgcgctccgaaagtttccttttatggcgaggcggcggcggcggcggccctataaaaagcgaagcgcgcggcgggcgggagcaagcttcgtttagtgaaccgtcagatcgcctggagacgccatccacgctgttttgacctccatagaagacaccgggaccgatccagcctccgcggattcgaatcccggccgggaacggtgcattggaacgcggattccccgtgccaagagtgacgtaagtaccgcctatagagtctataggcccacaaaaaatgctttcttcttttaatatacttttttgtttatcttatttctaatactttccctaatctctttctttcagggcaataatgatacaatgtatcatgcctctttgcaccattctaaagaataacagtgataatttctgggttaaggcaatagcaatatttctgcatataaatatttctgcatataaattgtaactgatgtaagaggtttcatattgctaatagcagctacaatccagctaccattctgcttttattttatggttgggataaggctggattattctgagtccaagctaggcccttttgctaatcatgttcatacctcttatcttcctcccacagctcctgggcaacgtgctggtctgtgtgctggcccatcactttggcaaagaattgggattcgaaccggtgtgctgggcggggggcggcgggccctcccgcagaacaccatgcgctcttcggaagctttggctcgggacttcacctgtgacctggtgaagtcccgagccaaagcttctgaggagcgccttgacagcagccatgggagggccgccccctacctcagtgactcgaggggtggcatccctgtgacccctccccagtgcctctcctggccctggaagttgccactccagtgcccaccagccttgtcctaataaaattaagttgcatcattttgtctgactaggtgtccttctataatattatggggtggaggggggtggtatggagcaaggggcaagttgggaagacaacctgtagggcctgcggggtctattgggaaccaagctggagtgcagtggcacaatcttggctcactgcaatctccgcctcctgggttcaagcgattctcctgcctcagcctcccgagttgttgggattccaggcatgcatgaccaggctcagctaatttttgtttttttggtagagacggggtttcaccatattggccaggctggtctccaactcctaatctcaggtgatctacccaccttggcctcccaaattgctgggattacaggcgtgaaccactgctcccttccctgtccttatcgatgcctagggttaatcattaactacaaggaacccctagtgatggagttggccactccctctctgcgcgctcgctcgctcactgaggccgggcgaccaaaggtcgcccgacgcccgggctttgcccgggcggcctcagtgagcgagcgagcgcgcag

SEQ ID NO: 5167 - DNA, 2198 bp, synthetic construct
  source 1..2198: mol_type = other DNA
ctgcgcgctcgctcgctcactgaggccgcccgggcaaagcccgggcgtcgggcgacctttggtcgcccggcctcagtgagcgagcgagcgcgcagagagggagtgtagccatgctctaggaagatcaattcaattcacgcgtcgacattgattattgactagttattaatagtaatcaattacggggtcattagttcatagcccatatatggagttccgcgttacataacttacggtaaatggcccgcctggctgaccgcccaacgacccccgcccattgacgtcaataatgacgtatgttcccatagtaacgccaatagggactttccattgacgtcaatgggtggagtatttacggtaaactgcccacttggcagtacatcaagtgtatcatatgccaagtacgccccctattgacgtcaatgacggtaaatggcccgcctggcattatgcccagtacatgaccttatgggactttcctacttggcagtacatctacgtattagtcatcgctattaccatgtcgaggccacgttctgcttcactctccccatctcccccccctccccacccccaattttgtatttatttattttttaattattttgtgcagcgatgggggcggggggggggggcgcgcgccaggcggggcggggcggggcgaggggcggggcggggcgaggcggagaggtgcggcggcagccaatcagagcggcgcgctccgaaagtttccttttatggcgaggcggcggcggcggcggccctataaaaagcgaagcgcgcggcgggcgggagcaagcttcgtttagtgaaccgtcagatcgcctggagacgccatccacgctgttttgacctccatagaagacaccgggaccgatccagcctccgcggattcgaatcccggccgggaacggtgcattggaacgcggattccccgtgccaagagtgacgtaagtaccgcctatagagtctataggcccacaaaaaatgctttcttcttttaatatacttttttgtttatcttatttctaatactttccctaatctctttctttcagggcaataatgatacaatgtatcatgcctctttgcaccattctaaagaataacagtgataatttctgggttaaggcaatagcaatatttctgcatataaatatttctgcatataaattgtaactgatgtaagaggtttcatattgctaatagcagctacaatccagctaccattctgcttttattttatggttgggataaggctggattattctgagtccaagctaggcccttttgctaatcatgttcatacctcttatcttcctcccacagctcctgggcaacgtgctggtctgtgtgctggcccatcactttggcaaagaattgggattcgaaccggtgtgctgggcggggggcggcgggccctcccgcagaacaccatgcgctcttcggaaagctgaccttccgcgagaacctgtgacctggttctcgcggaaggtcagctttctgaggagcgccttgacagcagccatgggagggccgccccctacctcagtgactcgaggggtggcatccctgtgacccctccccagtgcctctcctggccctggaagttgccactccagtgcccaccagccttgtcctaataaaattaagttgcatcattttgtctgactaggtgtccttctataatattatggggtggaggggggtggtatggagcaaggggcaagttgggaagacaacctgtagggcctgcggggtctattgggaaccaagctggagtgcagtggcacaatcttggctcactgcaatctccgcctcctgggttcaagcgattctcctgcctcagcctcccgagttgttgggattccaggcatgcatgaccaggctcagctaatttttgtttttttggtagagacggggtttcaccatattggccaggctggtctccaactcctaatctcaggtgatctacccaccttggcctcccaaattgctgggattacaggcgtgaaccactgctcccttccctgtccttatcgatgcctagggttaatcattaactacaaggaacccctagtgatggagttggccactccctctctgcgcgctcgctcgctcactgaggccgggcgaccaaaggtcgcccgacgcccgggctttgcccgggcggcctcagtgagcgagcgagcgcgcag

SEQ ID NO: 5168 - DNA, 2198 bp, synthetic construct
  source 1..2198: mol_type = other DNA
ctgcgcgctcgctcgctcactgaggccgcccgggcaaagcccgggcgtcgggcgacctttggtcgcccggcctcagtgagcgagcgagcgcgcagagagggagtgtagccatgctctaggaagatcaattcaattcacgcgtcgacattgattattgactagttattaatagtaatcaattacggggtcattagttcatagcccatatatggagttccgcgttacataacttacggtaaatggcccgcctggctgaccgcccaacgacccccgcccattgacgtcaataatgacgtatgttcccatagtaacgccaatagggactttccattgacgtcaatgggtggagtatttacggtaaactgcccacttggcagtacatcaagtgtatcatatgccaagtacgccccctattgacgtcaatgacggtaaatggcccgcctggcattatgcccagtacatgaccttatgggactttcctacttggcagtacatctacgtattagtcatcgctattaccatgtcgaggccacgttctgcttcactctccccatctcccccccctccccacccccaattttgtatttatttattttttaattattttgtgcagcgatgggggcggggggggggggcgcgcgccaggcggggcggggcggggcgaggggcggggcggggcgaggcggagaggtgcggcggcagccaatcagagcggcgcgctccgaaagtttccttttatggcgaggcggcggcggcggcggccctataaaaagcgaagcgcgcggcgggcgggagcaagcttcgtttagtgaaccgtcagatcgcctggagacgccatccacgctgttttgacctccatagaagacaccgggaccgatccagcctccgcggattcgaatcccggccgggaacggtgcattggaacgcggattccccgtgccaagagtgacgtaagtaccgcctatagagtctataggcccacaaaaaatgctttcttcttttaatatacttttttgtttatcttatttctaatactttccctaatctctttctttcagggcaataatgatacaatgtatcatgcctctttgcaccattctaaagaataacagtgataatttctgggttaaggcaatagcaatatttctgcatataaatatttctgcatataaattgtaactgatgtaagaggtttcatattgctaatagcagctacaatccagctaccattctgcttttattttatggttgggataaggctggattattctgagtccaagctaggcccttttgctaatcatgttcatacctcttatcttcctcccacagctcctgggcaacgtgctggtctgtgtgctggcccatcactttggcaaagaattgggattcgaaccggtgtgctgggcggggggcggcgggccctcccgcagaacaccatgcgctcttcggaagccgtcttccgccaagagacctgtgacctggtctcttggcggaagacggcttctgaggagcgccttgacagcagccatgggagggccgccccctacctcagtgactcgaggggtggcatccctgtgacccctccccagtgcctctcctggccctggaagttgccactccagtgcccaccagccttgtcctaataaaattaagttgcatcattttgtctgactaggtgtccttctataatattatggggtggaggggggtggtatggagcaaggggcaagttgggaagacaacctgtagggcctgcggggtctattgggaaccaagctggagtgcagtggcacaatcttggctcactgcaatctccgcctcctgggttcaagcgattctcctgcctcagcctcccgagttgttgggattccaggcatgcatgaccaggctcagctaatttttgtttttttggtagagacggggtttcaccatattggccaggctggtctccaactcctaatctcaggtgatctacccaccttggcctcccaaattgctgggattacaggcgtgaaccactgctcccttccctgtccttatcgatgcctagggttaatcattaactacaaggaacccctagtgatggagttggccactccctctctgcgcgctcgctcgctcactgaggccgggcgaccaaaggtcgcccgacgcccgggctttgcccgggcggcctcagtgagcgagcgagcgcgcag

SEQ ID NO: 5169 - DNA, 2198 bp, synthetic construct
  source 1..2198: mol_type = other DNA
ctgcgcgctcgctcgctcactgaggccgcccgggcaaagcccgggcgtcgggcgacctttggtcgcccggcctcagtgagcgagcgagcgcgcagagagggagtgtagccatgctctaggaagatcaattcaattcacgcgtcgacattgattattgactagttattaatagtaatcaattacggggtcattagttcatagcccatatatggagttccgcgttacataacttacggtaaatggcccgcctggctgaccgcccaacgacccccgcccattgacgtcaataatgacgtatgttcccatagtaacgccaatagggactttccattgacgtcaatgggtggagtatttacggtaaactgcccacttggcagtacatcaagtgtatcatatgccaagtacgccccctattgacgtcaatgacggtaaatggcccgcctggcattatgcccagtacatgaccttatgggactttcctacttggcagtacatctacgtattagtcatcgctattaccatgtcgaggccacgttctgcttcactctccccatctcccccccctccccacccccaattttgtatttatttattttttaattattttgtgcagcgatgggggcggggggggggggcgcgcgccaggcggggcggggcggggcgaggggcggggcggggcgaggcggagaggtgcggcggcagccaatcagagcggcgcgctccgaaagtttccttttatggcgaggcggcggcggcggcggccctataaaaagcgaagcgcgcggcgggcgggagcaagcttcgtttagtgaaccgtcagatcgcctggagacgccatccacgctgttttgacctccatagaagacaccgggaccgatccagcctccgcggattcgaatcccggccgggaacggtgcattggaacgcggattccccgtgccaagagtgacgtaagtaccgcctatagagtctataggcccacaaaaaatgctttcttcttttaatatacttttttgtttatcttatttctaatactttccctaatctctttctttcagggcaataatgatacaatgtatcatgcctctttgcaccattctaaagaataacagtgataatttctgggttaaggcaatagcaatatttctgcatataaatatttctgcatataaattgtaactgatgtaagaggtttcatattgctaatagcagctacaatccagctaccattctgcttttattttatggttgggataaggctggattattctgagtccaagctaggcccttttgctaatcatgttcatacctcttatcttcctcccacagctcctgggcaacgtgctggtctgtgtgctggcccatcactttggcaaagaattgggattcgaaccggtgtgctgggcggggggcggcgggccctcccgcagaacaccatgcgctcttcggaacctcgcagttcggttaatccctgtgacctggtattaaccgaactgcgaggttctgaggagcgccttgacagcagccatgggagggccgccccctacctcagtgactcgaggggtggcatccctgtgacccctccccagtgcctctcctggccctggaagttgccactccagtgcccaccagccttgtcctaataaaattaagttgcatcattttgtctgactaggtgtccttctataatattatggggtggaggggggtggtatggagcaaggggcaagttgggaagacaacctgtagggcctgcggggtctattgggaaccaagctggagtgcagtggcacaatcttggctcactgcaatctccgcctcctgggttcaagcgattctcctgcctcagcctcccgagttgttgggattccaggcatgcatgaccaggctcagctaatttttgtttttttggtagagacggggtttcaccatattggccaggctggtctccaactcctaatctcaggtgatctacccaccttggcctcccaaattgctgggattacaggcgtgaaccactgctcccttccctgtccttatcgatgcctagggttaatcattaactacaaggaacccctagtgatggagttggccactccctctctgcgcgctcgctcgctcactgaggccgggcgaccaaaggtcgcccgacgcccgggctttgcccgggcggcctcagtgagcgagcgagcgcgcag

SEQ ID NO: 5170 - DNA, 2198 bp, synthetic construct
  source 1..2198: mol_type = other DNA
ctgcgcgctcgctcgctcactgaggccgcccgggcaaagcccgggcgtcgggcgacctttggtcgcccggcctcagtgagcgagcgagcgcgcagagagggagtgtagccatgctctaggaagatcaattcaattcacgcgtcgacattgattattgactagttattaatagtaatcaattacggggtcattagttcatagcccatatatggagttccgcgttacataacttacggtaaatggcccgcctggctgaccgcccaacgacccccgcccattgacgtcaataatgacgtatgttcccatagtaacgccaatagggactttccattgacgtcaatgggtggagtatttacggtaaactgcccacttggcagtacatcaagtgtatcatatgccaagtacgccccctattgacgtcaatgacggtaaatggcccgcctggcattatgcccagtacatgaccttatgggactttcctacttggcagtacatctacgtattagtcatcgctattaccatgtcgaggccacgttctgcttcactctccccatctcccccccctccccacccccaattttgtatttatttattttttaattattttgtgcagcgatgggggcggggggggggggcgcgcgccaggcggggcggggcggggcgaggggcggggcggggcgaggcggagaggtgcggcggcagccaatcagagcggcgcgctccgaaagtttccttttatggcgaggcggcggcggcggcggccctataaaaagcgaagcgcgcggcgggcgggagcaagcttcgtttagtgaaccgtcagatcgcctggagacgccatccacgctgttttgacctccatagaagacaccgggaccgatccagcctccgcggattcgaatcccggccgggaacggtgcattggaacgcggattccccgtgccaagagtgacgtaagtaccgcctatagagtctataggcccacaaaaaatgctttcttcttttaatatacttttttgtttatcttatttctaatactttccctaatctctttctttcagggcaataatgatacaatgtatcatgcctctttgcaccattctaaagaataacagtgataatttctgggttaaggcaatagcaatatttctgcatataaatatttctgcatataaattgtaactgatgtaagaggtttcatattgctaatagcagctacaatccagctaccattctgcttttattttatggttgggataaggctggattattctgagtccaagctaggcccttttgctaatcatgttcatacctcttatcttcctcccacagctcctgggcaacgtgctggtctgtgtgctggcccatcactttggcaaagaattgggattcgaaccggtgtgctgggcggggggcggcgggccctcccgcagaacaccatgcgctcttcggaagctttggctcgggacttcccctgtgacctggtgaagtcccgagccaaagcttctgaggagcgccttgacagcagccatgggagggccgccccctacctcagtgactcgaggggtggcatccctgtgacccctccccagtgcctctcctggccctggaagttgccactccagtgcccaccagccttgtcctaataaaattaagttgcatcattttgtctgactaggtgtccttctataatattatggggtggaggggggtggtatggagcaaggggcaagttgggaagacaacctgtagggcctgcggggtctattgggaaccaagctggagtgcagtggcacaatcttggctcactgcaatctccgcctcctgggttcaagcgattctcctgcctcagcctcccgagttgttgggattccaggcatgcatgaccaggctcagctaatttttgtttttttggtagagacggggtttcaccatattggccaggctggtctccaactcctaatctcaggtgatctacccaccttggcctcccaaattgctgggattacaggcgtgaaccactgctcccttccctgtccttatcgatgcctagggttaatcattaactacaaggaacccctagtgatggagttggccactccctctctgcgcgctcgctcgctcactgaggccgggcgaccaaaggtcgcccgacgcccgggctttgcccgggcggcctcagtgagcgagcgagcgcgcag

SEQ ID NO: 5171 - DNA, 2198 bp, synthetic construct
  source 1..2198: mol_type = other DNA
ctgcgcgctcgctcgctcactgaggccgcccgggcaaagcccgggcgtcgggcgacctttggtcgcccggcctcagtgagcgagcgagcgcgcagagagggagtgtagccatgctctaggaagatcaattcaattcacgcgtcgacattgattattgactagttattaatagtaatcaattacggggtcattagttcatagcccatatatggagttccgcgttacataacttacggtaaatggcccgcctggctgaccgcccaacgacccccgcccattgacgtcaataatgacgtatgttcccatagtaacgccaatagggactttccattgacgtcaatgggtggagtatttacggtaaactgcccacttggcagtacatcaagtgtatcatatgccaagtacgccccctattgacgtcaatgacggtaaatggcccgcctggcattatgcccagtacatgaccttatgggactttcctacttggcagtacatctacgtattagtcatcgctattaccatgtcgaggccacgttctgcttcactctccccatctcccccccctccccacccccaattttgtatttatttattttttaattattttgtgcagcgatgggggcggggggggggggcgcgcgccaggcggggcggggcggggcgaggggcggggcggggcgaggcggagaggtgcggcggcagccaatcagagcggcgcgctccgaaagtttccttttatggcgaggcggcggcggcggcggccctataaaaagcgaagcgcgcggcgggcgggagcaagcttcgtttagtgaaccgtcagatcgcctggagacgccatccacgctgttttgacctccatagaagacaccgggaccgatccagcctccgcggattcgaatcccggccgggaacggtgcattggaacgcggattccccgtgccaagagtgacgtaagtaccgcctatagagtctataggcccacaaaaaatgctttcttcttttaatatacttttttgtttatcttatttctaatactttccctaatctctttctttcagggcaataatgatacaatgtatcatgcctctttgcaccattctaaagaataacagtgataatttctgggttaaggcaatagcaatatttctgcatataaatatttctgcatataaattgtaactgatgtaagaggtttcatattgctaatagcagctacaatccagctaccattctgcttttattttatggttgggataaggctggattattctgagtccaagctaggcccttttgctaatcatgttcatacctcttatcttcctcccacagctcctgggcaacgtgctggtctgtgtgctggcccatcactttggcaaagaattgggattcgaaccggtgtgctgggcggggggcggcgggccctcccgcagaacaccatgcgctcttcggaaagctgaccttccgcgagaccctgtgacctggttctcgcggaaggtcagctttctgaggagcgccttgacagcagccatgggagggccgccccctacctcagtgactcgaggggtggcatccctgtgacccctccccagtgcctctcctggccctggaagttgccactccagtgcccaccagccttgtcctaataaaattaagttgcatcattttgtctgactaggtgtccttctataatattatggggtggaggggggtggtatggagcaaggggcaagttgggaagacaacctgtagggcctgcggggtctattgggaaccaagctggagtgcagtggcacaatcttggctcactgcaatctccgcctcctgggttcaagcgattctcctgcctcagcctcccgagttgttgggattccaggcatgcatgaccaggctcagctaatttttgtttttttggtagagacggggtttcaccatattggccaggctggtctccaactcctaatctcaggtgatctacccaccttggcctcccaaattgctgggattacaggcgtgaaccactgctcccttccctgtccttatcgatgcctagggttaatcattaactacaaggaacccctagtgatggagttggccactccctctctgcgcgctcgctcgctcactgaggccgggcgaccaaaggtcgcccgacgcccgggctttgcccgggcggcctcagtgagcgagcgagcgcgcag

SEQ ID NO: 5172 - DNA, 2198 bp, synthetic construct
  source 1..2198: mol_type = other DNA
ctgcgcgctcgctcgctcactgaggccgcccgggcaaagcccgggcgtcgggcgacctttggtcgcccggcctcagtgagcgagcgagcgcgcagagagggagtgtagccatgctctaggaagatcaattcaattcacgcgtcgacattgattattgactagttattaatagtaatcaattacggggtcattagttcatagcccatatatggagttccgcgttacataacttacggtaaatggcccgcctggctgaccgcccaacgacccccgcccattgacgtcaataatgacgtatgttcccatagtaacgccaatagggactttccattgacgtcaatgggtggagtatttacggtaaactgcccacttggcagtacatcaagtgtatcatatgccaagtacgccccctattgacgtcaatgacggtaaatggcccgcctggcattatgcccagtacatgaccttatgggactttcctacttggcagtacatctacgtattagtcatcgctattaccatgtcgaggccacgttctgcttcactctccccatctcccccccctccccacccccaattttgtatttatttattttttaattattttgtgcagcgatgggggcggggggggggggcgcgcgccaggcggggcggggcggggcgaggggcggggcggggcgaggcggagaggtgcggcggcagccaatcagagcggcgcgctccgaaagtttccttttatggcgaggcggcggcggcggcggccctataaaaagcgaagcgcgcggcgggcgggagcaagcttcgtttagtgaaccgtcagatcgcctggagacgccatccacgctgttttgacctccatagaagacaccgggaccgatccagcctccgcggattcgaatcccggccgggaacggtgcattggaacgcggattccccgtgccaagagtgacgtaagtaccgcctatagagtctataggcccacaaaaaatgctttcttcttttaatatacttttttgtttatcttatttctaatactttccctaatctctttctttcagggcaataatgatacaatgtatcatgcctctttgcaccattctaaagaataacagtgataatttctgggttaaggcaatagcaatatttctgcatataaatatttctgcatataaattgtaactgatgtaagaggtttcatattgctaatagcagctacaatccagctaccattctgcttttattttatggttgggataaggctggattattctgagtccaagctaggcccttttgctaatcatgttcatacctcttatcttcctcccacagctcctgggcaacgtgctggtctgtgtgctggcccatcactttggcaaagaattgggattcgaaccggtgtgctgggcggggggcggcgggccctcccgcagaacaccatgcgctcttcggaagccgtcttccgccaagagccctgtgacctggtctcttggcggaagacggcttctgaggagcgccttgacagcagccatgggagggccgccccctacctcagtgactcgaggggtggcatccctgtgacccctccccagtgcctctcctggccctggaagttgccactccagtgcccaccagccttgtcctaataaaattaagttgcatcattttgtctgactaggtgtccttctataatattatggggtggaggggggtggtatggagcaaggggcaagttgggaagacaacctgtagggcctgcggggtctattgggaaccaagctggagtgcagtggcacaatcttggctcactgcaatctccgcctcctgggttcaagcgattctcctgcctcagcctcccgagttgttgggattccaggcatgcatgaccaggctcagctaatttttgtttttttggtagagacggggtttcaccatattggccaggctggtctccaactcctaatctcaggtgatctacccaccttggcctcccaaattgctgggattacaggcgtgaaccactgctcccttccctgtccttatcgatgcctagggttaatcattaactacaaggaacccctagtgatggagttggccactccctctctgcgcgctcgctcgctcactgaggccgggcgaccaaaggtcgcccgacgcccgggctttgcccgggcggcctcagtgagcgagcgagcgcgcag

SEQ ID NO: 5173 - DNA, 2300 bp, synthetic construct
  source 1..2300: mol_type = other DNA
ctgcgcgctcgctcgctcactgaggccgcccgggcaaagcccgggcgtcgggcgacctttggtcgcccggcctcagtgagcgagcgagcgcgcagagagggagtgtagccatgctctaggaagatcaattcaattcacgcgtcgacattgattattgactagttattaatagtaatcaattacggggtcattagttcatagcccatatatggagttccgcgttacataacttacggtaaatggcccgcctggctgaccgcccaacgacccccgcccattgacgtcaataatgacgtatgttcccatagtaacgccaatagggactttccattgacgtcaatgggtggagtatttacggtaaactgcccacttggcagtacatcaagtgtatcatatgccaagtacgccccctattgacgtcaatgacggtaaatggcccgcctggcattatgcccagtacatgaccttatgggactttcctacttggcagtacatctacgtattagtcatcgctattaccatgtcgaggccacgttctgcttcactctccccatctcccccccctccccacccccaattttgtatttatttattttttaattattttgtgcagcgatgggggcggggggggggggcgcgcgccaggcggggcggggcggggcgaggggcggggcggggcgaggcggagaggtgcggcggcagccaatcagagcggcgcgctccgaaagtttccttttatggcgaggcggcggcggcggcggccctataaaaagcgaagcgcgcggcgggcgggagcaagcttcgtttagtgaaccgtcagatcgcctggagacgccatccacgctgttttgacctccatagaagacaccgggaccgatccagcctccgcggattcgaatcccggccgggaacggtgcattggaacgcggattccccgtgccaagagtgacgtaagtaccgcctatagagtctataggcccacaaaaaatgctttcttcttttaatatacttttttgtttatcttatttctaatactttccctaatctctttctttcagggcaataatgatacaatgtatcatgcctctttgcaccattctaaagaataacagtgataatttctgggttaaggcaatagcaatatttctgcatataaatatttctgcatataaattgtaactgatgtaagaggtttcatattgctaatagcagctacaatccagctaccattctgcttttattttatggttgggataaggctggattattctgagtccaagctaggcccttttgctaatcatgttcatacctcttatcttcctcccacagctcctgggcaacgtgctggtctgtgtgctggcccatcactttggcaaagaattgggattcgaaccggtgaagcaaagaaggggcagagggagcccgtgagctgagtgggccagggactgggagaaggagtgaggaggcagggccggcatgcctctgctgctggccagagactggaagcgatgacaatctgtctgcacctgtcactagtttgtcatcgcttccagtctttggccgtgtagtgctacccagcgctggctgcctcctcagcattgcaattcctctcccatctgggcaccagtcagctaccctggtgggaatctgggtagccctcgaggggtggcatccctgtgacccctccccagtgcctctcctggccctggaagttgccactccagtgcccaccagccttgtcctaataaaattaagttgcatcattttgtctgactaggtgtccttctataatattatggggtggaggggggtggtatggagcaaggggcaagttgggaagacaacctgtagggcctgcggggtctattgggaaccaagctggagtgcagtggcacaatcttggctcactgcaatctccgcctcctgggttcaagcgattctcctgcctcagcctcccgagttgttgggattccaggcatgcatgaccaggctcagctaatttttgtttttttggtagagacggggtttcaccatattggccaggctggtctccaactcctaatctcaggtgatctacccaccttggcctcccaaattgctgggattacaggcgtgaaccactgctcccttccctgtccttatcgatgcctagggttaatcattaactacaaggaacccctagtgatggagttggccactccctctctgcgcgctcgctcgctcactgaggccgggcgaccaaaggtcgcccgacgcccgggctttgcccgggcggcctcagtgagcgagcgagcgcgcag

SEQ ID NO: 5174 - DNA, 2198 bp, synthetic construct
  source 1..2198: mol_type = other DNA
ctgcgcgctcgctcgctcactgaggccgcccgggcaaagcccgggcgtcgggcgacctttggtcgcccggcctcagtgagcgagcgagcgcgcagagagggagtgtagccatgctctaggaagatcaattcaattcacgcgtcgacattgattattgactagttattaatagtaatcaattacggggtcattagttcatagcccatatatggagttccgcgttacataacttacggtaaatggcccgcctggctgaccgcccaacgacccccgcccattgacgtcaataatgacgtatgttcccatagtaacgccaatagggactttccattgacgtcaatgggtggagtatttacggtaaactgcccacttggcagtacatcaagtgtatcatatgccaagtacgccccctattgacgtcaatgacggtaaatggcccgcctggcattatgcccagtacatgaccttatgggactttcctacttggcagtacatctacgtattagtcatcgctattaccatgtcgaggccacgttctgcttcactctccccatctcccccccctccccacccccaattttgtatttatttattttttaattattttgtgcagcgatgggggcggggggggggggcgcgcgccaggcggggcggggcggggcgaggggcggggcggggcgaggcggagaggtgcggcggcagccaatcagagcggcgcgctccgaaagtttccttttatggcgaggcggcggcggcggcggccctataaaaagcgaagcgcgcggcgggcgggagcaagcttcgtttagtgaaccgtcagatcgcctggagacgccatccacgctgttttgacctccatagaagacaccgggaccgatccagcctccgcggattcgaatcccggccgggaacggtgcattggaacgcggattccccgtgccaagagtgacgtaagtaccgcctatagagtctataggcccacaaaaaatgctttcttcttttaatatacttttttgtttatcttatttctaatactttccctaatctctttctttcagggcaataatgatacaatgtatcatgcctctttgcaccattctaaagaataacagtgataatttctgggttaaggcaatagcaatatttctgcatataaatatttctgcatataaattgtaactgatgtaagaggtttcatattgctaatagcagctacaatccagctaccattctgcttttattttatggttgggataaggctggattattctgagtccaagctaggcccttttgctaatcatgttcatacctcttatcttcctcccacagctcctgggcaacgtgctggtctgtgtgctggcccatcactttggcaaagaattgggattcgaaccggtgtgctgggcggggggcggcgggccctcccgcagaacaccatgcgctcttcggaagactggaagcgatgacaaccctgtgacctggtttgtcatcgcttccagtcttctgaggagcgccttgacagcagccatgggagggccgccccctacctcagtgactcgaggggtggcatccctgtgacccctccccagtgcctctcctggccctggaagttgccactccagtgcccaccagccttgtcctaataaaattaagttgcatcattttgtctgactaggtgtccttctataatattatggggtggaggggggtggtatggagcaaggggcaagttgggaagacaacctgtagggcctgcggggtctattgggaaccaagctggagtgcagtggcacaatcttggctcactgcaatctccgcctcctgggttcaagcgattctcctgcctcagcctcccgagttgttgggattccaggcatgcatgaccaggctcagctaatttttgtttttttggtagagacggggtttcaccatattggccaggctggtctccaactcctaatctcaggtgatctacccaccttggcctcccaaattgctgggattacaggcgtgaaccactgctcccttccctgtccttatcgatgcctagggttaatcattaactacaaggaacccctagtgatggagttggccactccctctctgcgcgctcgctcgctcactgaggccgggcgaccaaaggtcgcccgacgcccgggctttgcccgggcggcctcagtgagcgagcgagcgcgcag

SEQ ID NO: 5175 - DNA, 2198 bp, synthetic construct
  source 1..2198: mol_type = other DNA
ctgcgcgctcgctcgctcactgaggccgcccgggcaaagcccgggcgtcgggcgacctttggtcgcccggcctcagtgagcgagcgagcgcgcagagagggagtgtagccatgctctaggaagatcaattcaattcacgcgtcgacattgattattgactagttattaatagtaatcaattacggggtcattagttcatagcccatatatggagttccgcgttacataacttacggtaaatggcccgcctggctgaccgcccaacgacccccgcccattgacgtcaataatgacgtatgttcccatagtaacgccaatagggactttccattgacgtcaatgggtggagtatttacggtaaactgcccacttggcagtacatcaagtgtatcatatgccaagtacgccccctattgacgtcaatgacggtaaatggcccgcctggcattatgcccagtacatgaccttatgggactttcctacttggcagtacatctacgtattagtcatcgctattaccatgtcgaggccacgttctgcttcactctccccatctcccccccctccccacccccaattttgtatttatttattttttaattattttgtgcagcgatgggggcggggggggggggcgcgcgccaggcggggcggggcggggcgaggggcggggcggggcgaggcggagaggtgcggcggcagccaatcagagcggcgcgctccgaaagtttccttttatggcgaggcggcggcggcggcggccctataaaaagcgaagcgcgcggcgggcgggagcaagcttcgtttagtgaaccgtcagatcgcctggagacgccatccacgctgttttgacctccatagaagacaccgggaccgatccagcctccgcggattcgaatcccggccgggaacggtgcattggaacgcggattccccgtgccaagagtgacgtaagtaccgcctatagagtctataggcccacaaaaaatgctttcttcttttaatatacttttttgtttatcttatttctaatactttccctaatctctttctttcagggcaataatgatacaatgtatcatgcctctttgcaccattctaaagaataacagtgataatttctgggttaaggcaatagcaatatttctgcatataaatatttctgcatataaattgtaactgatgtaagaggtttcatattgctaatagcagctacaatccagctaccattctgcttttattttatggttgggataaggctggattattctgagtccaagctaggcccttttgctaatcatgttcatacctcttatcttcctcccacagctcctgggcaacgtgctggtctgtgtgctggcccatcactttggcaaagaattgggattcgaaccggtgtgctgggcggggggcggcgggccctcccgcagaacaccatgcgctcttcggaacttccgcgagaacgccaaccctgtgacctggtttggcgttctcgcggaagttctgaggagcgccttgacagcagccatgggagggccgccccctacctcagtgactcgaggggtggcatccctgtgacccctccccagtgcctctcctggccctggaagttgccactccagtgcccaccagccttgtcctaataaaattaagttgcatcattttgtctgactaggtgtccttctataatattatggggtggaggggggtggtatggagcaaggggcaagttgggaagacaacctgtagggcctgcggggtctattgggaaccaagctggagtgcagtggcacaatcttggctcactgcaatctccgcctcctgggttcaagcgattctcctgcctcagcctcccgagttgttgggattccaggcatgcatgaccaggctcagctaatttttgtttttttggtagagacggggtttcaccatattggccaggctggtctccaactcctaatctcaggtgatctacccaccttggcctcccaaattgctgggattacaggcgtgaaccactgctcccttccctgtccttatcgatgcctagggttaatcattaactacaaggaacccctagtgatggagttggccactccctctctgcgcgctcgctcgctcactgaggccgggcgaccaaaggtcgcccgacgcccgggctttgcccgggcggcctcagtgagcgagcgagcgcgcag

SEQ ID NO: 5176 - DNA, 2198 bp, synthetic construct
  source 1..2198: mol_type = other DNA
ctgcgcgctcgctcgctcactgaggccgcccgggcaaagcccgggcgtcgggcgacctttggtcgcccggcctcagtgagcgagcgagcgcgcagagagggagtgtagccatgctctaggaagatcaattcaattcacgcgtcgacattgattattgactagttattaatagtaatcaattacggggtcattagttcatagcccatatatggagttccgcgttacataacttacggtaaatggcccgcctggctgaccgcccaacgacccccgcccattgacgtcaataatgacgtatgttcccatagtaacgccaatagggactttccattgacgtcaatgggtggagtatttacggtaaactgcccacttggcagtacatcaagtgtatcatatgccaagtacgccccctattgacgtcaatgacggtaaatggcccgcctggcattatgcccagtacatgaccttatgggactttcctacttggcagtacatctacgtattagtcatcgctattaccatgtcgaggccacgttctgcttcactctccccatctcccccccctccccacccccaattttgtatttatttattttttaattattttgtgcagcgatgggggcggggggggggggcgcgcgccaggcggggcggggcggggcgaggggcggggcggggcgaggcggagaggtgcggcggcagccaatcagagcggcgcgctccgaaagtttccttttatggcgaggcggcggcggcggcggccctataaaaagcgaagcgcgcggcgggcgggagcaagcttcgtttagtgaaccgtcagatcgcctggagacgccatccacgctgttttgacctccatagaagacaccgggaccgatccagcctccgcggattcgaatcccggccgggaacggtgcattggaacgcggattccccgtgccaagagtgacgtaagtaccgcctatagagtctataggcccacaaaaaatgctttcttcttttaatatacttttttgtttatcttatttctaatactttccctaatctctttctttcagggcaataatgatacaatgtatcatgcctctttgcaccattctaaagaataacagtgataatttctgggttaaggcaatagcaatatttctgcatataaatatttctgcatataaattgtaactgatgtaagaggtttcatattgctaatagcagctacaatccagctaccattctgcttttattttatggttgggataaggctggattattctgagtccaagctaggcccttttgctaatcatgttcatacctcttatcttcctcccacagctcctgggcaacgtgctggtctgtgtgctggcccatcactttggcaaagaattgggattcgaaccggtgtgctgggcggggggcggcgggccctcccgcagaacaccatgcgctcttcggaagctcctcgcagttcggttccctgtgacctggtaaccgaactgcgaggagcttctgaggagcgccttgacagcagccatgggagggccgccccctacctcagtgactcgaggggtggcatccctgtgacccctccccagtgcctctcctggccctggaagttgccactccagtgcccaccagccttgtcctaataaaattaagttgcatcattttgtctgactaggtgtccttctataatattatggggtggaggggggtggtatggagcaaggggcaagttgggaagacaacctgtagggcctgcggggtctattgggaaccaagctggagtgcagtggcacaatcttggctcactgcaatctccgcctcctgggttcaagcgattctcctgcctcagcctcccgagttgttgggattccaggcatgcatgaccaggctcagctaatttttgtttttttggtagagacggggtttcaccatattggccaggctggtctccaactcctaatctcaggtgatctacccaccttggcctcccaaattgctgggattacaggcgtgaaccactgctcccttccctgtccttatcgatgcctagggttaatcattaactacaaggaacccctagtgatggagttggccactccctctctgcgcgctcgctcgctcactgaggccgggcgaccaaaggtcgcccgacgcccgggctttgcccgggcggcctcagtgagcgagcgagcgcgcag

SEQ ID NO: 5177 - DNA, 2198 bp, synthetic construct
  source 1..2198: mol_type = other DNA
ctgcgcgctcgctcgctcactgaggccgcccgggcaaagcccgggcgtcgggcgacctttggtcgcccggcctcagtgagcgagcgagcgcgcagagagggagtgtagccatgctctaggaagatcaattcaattcacgcgtcgacattgattattgactagttattaatagtaatcaattacggggtcattagttcatagcccatatatggagttccgcgttacataacttacggtaaatggcccgcctggctgaccgcccaacgacccccgcccattgacgtcaataatgacgtatgttcccatagtaacgccaatagggactttccattgacgtcaatgggtggagtatttacggtaaactgcccacttggcagtacatcaagtgtatcatatgccaagtacgccccctattgacgtcaatgacggtaaatggcccgcctggcattatgcccagtacatgaccttatgggactttcctacttggcagtacatctacgtattagtcatcgctattaccatgtcgaggccacgttctgcttcactctccccatctcccccccctccccacccccaattttgtatttatttattttttaattattttgtgcagcgatgggggcggggggggggggcgcgcgccaggcggggcggggcggggcgaggggcggggcggggcgaggcggagaggtgcggcggcagccaatcagagcggcgcgctccgaaagtttccttttatggcgaggcggcggcggcggcggccctataaaaagcgaagcgcgcggcgggcgggagcaagcttcgtttagtgaaccgtcagatcgcctggagacgccatccacgctgttttgacctccatagaagacaccgggaccgatccagcctccgcggattcgaatcccggccgggaacggtgcattggaacgcggattccccgtgccaagagtgacgtaagtaccgcctatagagtctataggcccacaaaaaatgctttcttcttttaatatacttttttgtttatcttatttctaatactttccctaatctctttctttcagggcaataatgatacaatgtatcatgcctctttgcaccattctaaagaataacagtgataatttctgggttaaggcaatagcaatatttctgcatataaatatttctgcatataaattgtaactgatgtaagaggtttcatattgctaatagcagctacaatccagctaccattctgcttttattttatggttgggataaggctggattattctgagtccaagctaggcccttttgctaatcatgttcatacctcttatcttcctcccacagctcctgggcaacgtgctggtctgtgtgctggcccatcactttggcaaagaattgggattcgaaccggtgtgctgggcggggggcggcgggccctcccgcagaacaccatgcgctcttcggaaggctttggctcgggacttccctgtgacctggtaagtcccgagccaaagccttctgaggagcgccttgacagcagccatgggagggccgccccctacctcagtgactcgaggggtggcatccctgtgacccctccccagtgcctctcctggccctggaagttgccactccagtgcccaccagccttgtcctaataaaattaagttgcatcattttgtctgactaggtgtccttctataatattatggggtggaggggggtggtatggagcaaggggcaagttgggaagacaacctgtagggcctgcggggtctattgggaaccaagctggagtgcagtggcacaatcttggctcactgcaatctccgcctcctgggttcaagcgattctcctgcctcagcctcccgagttgttgggattccaggcatgcatgaccaggctcagctaatttttgtttttttggtagagacggggtttcaccatattggccaggctggtctccaactcctaatctcaggtgatctacccaccttggcctcccaaattgctgggattacaggcgtgaaccactgctcccttccctgtccttatcgatgcctagggttaatcattaactacaaggaacccctagtgatggagttggccactccctctctgcgcgctcgctcgctcactgaggccgggcgaccaaaggtcgcccgacgcccgggctttgcccgggcggcctcagtgagcgagcgagcgcgcag

SEQ ID NO: 5178 - DNA, 2198 bp, synthetic construct
  source 1..2198: mol_type = other DNA
ctgcgcgctcgctcgctcactgaggccgcccgggcaaagcccgggcgtcgggcgacctttggtcgcccggcctcagtgagcgagcgagcgcgcagagagggagtgtagccatgctctaggaagatcaattcaattcacgcgtcgacattgattattgactagttattaatagtaatcaattacggggtcattagttcatagcccatatatggagttccgcgttacataacttacggtaaatggcccgcctggctgaccgcccaacgacccccgcccattgacgtcaataatgacgtatgttcccatagtaacgccaatagggactttccattgacgtcaatgggtggagtatttacggtaaactgcccacttggcagtacatcaagtgtatcatatgccaagtacgccccctattgacgtcaatgacggtaaatggcccgcctggcattatgcccagtacatgaccttatgggactttcctacttggcagtacatctacgtattagtcatcgctattaccatgtcgaggccacgttctgcttcactctccccatctcccccccctccccacccccaattttgtatttatttattttttaattattttgtgcagcgatgggggcggggggggggggcgcgcgccaggcggggcggggcggggcgaggggcggggcggggcgaggcggagaggtgcggcggcagccaatcagagcggcgcgctccgaaagtttccttttatggcgaggcggcggcggcggcggccctataaaaagcgaagcgcgcggcgggcgggagcaagcttcgtttagtgaaccgtcagatcgcctggagacgccatccacgctgttttgacctccatagaagacaccgggaccgatccagcctccgcggattcgaatcccggccgggaacggtgcattggaacgcggattccccgtgccaagagtgacgtaagtaccgcctatagagtctataggcccacaaaaaatgctttcttcttttaatatacttttttgtttatcttatttctaatactttccctaatctctttctttcagggcaataatgatacaatgtatcatgcctctttgcaccattctaaagaataacagtgataatttctgggttaaggcaatagcaatatttctgcatataaatatttctgcatataaattgtaactgatgtaagaggtttcatattgctaatagcagctacaatccagctaccattctgcttttattttatggttgggataaggctggattattctgagtccaagctaggcccttttgctaatcatgttcatacctcttatcttcctcccacagctcctgggcaacgtgctggtctgtgtgctggcccatcactttggcaaagaattgggattcgaaccggtgtgctgggcggggggcggcgggccctcccgcagaacaccatgcgctcttcggaagactggaagcgatgacaaacctgtgacctggtttgtcatcgcttccagtcttctgaggagcgccttgacagcagccatgggagggccgccccctacctcagtgactcgaggggtggcatccctgtgacccctccccagtgcctctcctggccctggaagttgccactccagtgcccaccagccttgtcctaataaaattaagttgcatcattttgtctgactaggtgtccttctataatattatggggtggaggggggtggtatggagcaaggggcaagttgggaagacaacctgtagggcctgcggggtctattgggaaccaagctggagtgcagtggcacaatcttggctcactgcaatctccgcctcctgggttcaagcgattctcctgcctcagcctcccgagttgttgggattccaggcatgcatgaccaggctcagctaatttttgtttttttggtagagacggggtttcaccatattggccaggctggtctccaactcctaatctcaggtgatctacccaccttggcctcccaaattgctgggattacaggcgtgaaccactgctcccttccctgtccttatcgatgcctagggttaatcattaactacaaggaacccctagtgatggagttggccactccctctctgcgcgctcgctcgctcactgaggccgggcgaccaaaggtcgcccgacgcccgggctttgcccgggcggcctcagtgagcgagcgagcgcgcag

SEQ ID NO: 5179 - DNA, 2198 bp, synthetic construct
  source 1..2198: mol_type = other DNA
ctgcgcgctcgctcgctcactgaggccgcccgggcaaagcccgggcgtcgggcgacctttggtcgcccggcctcagtgagcgagcgagcgcgcagagagggagtgtagccatgctctaggaagatcaattcaattcacgcgtcgacattgattattgactagttattaatagtaatcaattacggggtcattagttcatagcccatatatggagttccgcgttacataacttacggtaaatggcccgcctggctgaccgcccaacgacccccgcccattgacgtcaataatgacgtatgttcccatagtaacgccaatagggactttccattgacgtcaatgggtggagtatttacggtaaactgcccacttggcagtacatcaagtgtatcatatgccaagtacgccccctattgacgtcaatgacggtaaatggcccgcctggcattatgcccagtacatgaccttatgggactttcctacttggcagtacatctacgtattagtcatcgctattaccatgtcgaggccacgttctgcttcactctccccatctcccccccctccccacccccaattttgtatttatttattttttaattattttgtgcagcgatgggggcggggggggggggcgcgcgccaggcggggcggggcggggcgaggggcggggcggggcgaggcggagaggtgcggcggcagccaatcagagcggcgcgctccgaaagtttccttttatggcgaggcggcggcggcggcggccctataaaaagcgaagcgcgcggcgggcgggagcaagcttcgtttagtgaaccgtcagatcgcctggagacgccatccacgctgttttgacctccatagaagacaccgggaccgatccagcctccgcggattcgaatcccggccgggaacggtgcattggaacgcggattccccgtgccaagagtgacgtaagtaccgcctatagagtctataggcccacaaaaaatgctttcttcttttaatatacttttttgtttatcttatttctaatactttccctaatctctttctttcagggcaataatgatacaatgtatcatgcctctttgcaccattctaaagaataacagtgataatttctgggttaaggcaatagcaatatttctgcatataaatatttctgcatataaattgtaactgatgtaagaggtttcatattgctaatagcagctacaatccagctaccattctgcttttattttatggttgggataaggctggattattctgagtccaagctaggcccttttgctaatcatgttcatacctcttatcttcctcccacagctcctgggcaacgtgctggtctgtgtgctggcccatcactttggcaaagaattgggattcgaaccggtgtgctgggcggggggcggcgggccctcccgcagaacaccatgcgctcttcggaacttccgcgagaacgccaaacctgtgacctggtttggcgttctcgcggaagttctgaggagcgccttgacagcagccatgggagggccgccccctacctcagtgactcgaggggtggcatccctgtgacccctccccagtgcctctcctggccctggaagttgccactccagtgcccaccagccttgtcctaataaaattaagttgcatcattttgtctgactaggtgtccttctataatattatggggtggaggggggtggtatggagcaaggggcaagttgggaagacaacctgtagggcctgcggggtctattgggaaccaagctggagtgcagtggcacaatcttggctcactgcaatctccgcctcctgggttcaagcgattctcctgcctcagcctcccgagttgttgggattccaggcatgcatgaccaggctcagctaatttttgtttttttggtagagacggggtttcaccatattggccaggctggtctccaactcctaatctcaggtgatctacccaccttggcctcccaaattgctgggattacaggcgtgaaccactgctcccttccctgtccttatcgatgcctagggttaatcattaactacaaggaacccctagtgatggagttggccactccctctctgcgcgctcgctcgctcactgaggccgggcgaccaaaggtcgcccgacgcccgggctttgcccgggcggcctcagtgagcgagcgagcgcgcag

SEQ ID NO: 5180 - DNA, 2198 bp, synthetic construct
  source 1..2198: mol_type = other DNA
ctgcgcgctcgctcgctcactgaggccgcccgggcaaagcccgggcgtcgggcgacctttggtcgcccggcctcagtgagcgagcgagcgcgcagagagggagtgtagccatgctctaggaagatcaattcaattcacgcgtcgacattgattattgactagttattaatagtaatcaattacggggtcattagttcatagcccatatatggagttccgcgttacataacttacggtaaatggcccgcctggctgaccgcccaacgacccccgcccattgacgtcaataatgacgtatgttcccatagtaacgccaatagggactttccattgacgtcaatgggtggagtatttacggtaaactgcccacttggcagtacatcaagtgtatcatatgccaagtacgccccctattgacgtcaatgacggtaaatggcccgcctggcattatgcccagtacatgaccttatgggactttcctacttggcagtacatctacgtattagtcatcgctattaccatgtcgaggccacgttctgcttcactctccccatctcccccccctccccacccccaattttgtatttatttattttttaattattttgtgcagcgatgggggcggggggggggggcgcgcgccaggcggggcggggcggggcgaggggcggggcggggcgaggcggagaggtgcggcggcagccaatcagagcggcgcgctccgaaagtttccttttatggcgaggcggcggcggcggcggccctataaaaagcgaagcgcgcggcgggcgggagcaagcttcgtttagtgaaccgtcagatcgcctggagacgccatccacgctgttttgacctccatagaagacaccgggaccgatccagcctccgcggattcgaatcccggccgggaacggtgcattggaacgcggattccccgtgccaagagtgacgtaagtaccgcctatagagtctataggcccacaaaaaatgctttcttcttttaatatacttttttgtttatcttatttctaatactttccctaatctctttctttcagggcaataatgatacaatgtatcatgcctctttgcaccattctaaagaataacagtgataatttctgggttaaggcaatagcaatatttctgcatataaatatttctgcatataaattgtaactgatgtaagaggtttcatattgctaatagcagctacaatccagctaccattctgcttttattttatggttgggataaggctggattattctgagtccaagctaggcccttttgctaatcatgttcatacctcttatcttcctcccacagctcctgggcaacgtgctggtctgtgtgctggcccatcactttggcaaagaattgggattcgaaccggtgtgctgggcggggggcggcgggccctcccgcagaacaccatgcgctcttcggaagctcctcgcagttcggttgcctgtgacctggtaaccgaactgcgaggagcttctgaggagcgccttgacagcagccatgggagggccgccccctacctcagtgactcgaggggtggcatccctgtgacccctccccagtgcctctcctggccctggaagttgccactccagtgcccaccagccttgtcctaataaaattaagttgcatcattttgtctgactaggtgtccttctataatattatggggtggaggggggtggtatggagcaaggggcaagttgggaagacaacctgtagggcctgcggggtctattgggaaccaagctggagtgcagtggcacaatcttggctcactgcaatctccgcctcctgggttcaagcgattctcctgcctcagcctcccgagttgttgggattccaggcatgcatgaccaggctcagctaatttttgtttttttggtagagacggggtttcaccatattggccaggctggtctccaactcctaatctcaggtgatctacccaccttggcctcccaaattgctgggattacaggcgtgaaccactgctcccttccctgtccttatcgatgcctagggttaatcattaactacaaggaacccctagtgatggagttggccactccctctctgcgcgctcgctcgctcactgaggccgggcgaccaaaggtcgcccgacgcccgggctttgcccgggcggcctcagtgagcgagcgagcgcgcag

SEQ ID NO: 5181 - DNA, 2198 bp, synthetic construct
  source 1..2198: mol_type = other DNA
ctgcgcgctcgctcgctcactgaggccgcccgggcaaagcccgggcgtcgggcgacctttggtcgcccggcctcagtgagcgagcgagcgcgcagagagggagtgtagccatgctctaggaagatcaattcaattcacgcgtcgacattgattattgactagttattaatagtaatcaattacggggtcattagttcatagcccatatatggagttccgcgttacataacttacggtaaatggcccgcctggctgaccgcccaacgacccccgcccattgacgtcaataatgacgtatgttcccatagtaacgccaatagggactttccattgacgtcaatgggtggagtatttacggtaaactgcccacttggcagtacatcaagtgtatcatatgccaagtacgccccctattgacgtcaatgacggtaaatggcccgcctggcattatgcccagtacatgaccttatgggactttcctacttggcagtacatctacgtattagtcatcgctattaccatgtcgaggccacgttctgcttcactctccccatctcccccccctccccacccccaattttgtatttatttattttttaattattttgtgcagcgatgggggcggggggggggggcgcgcgccaggcggggcggggcggggcgaggggcggggcggggcgaggcggagaggtgcggcggcagccaatcagagcggcgcgctccgaaagtttccttttatggcgaggcggcggcggcggcggccctataaaaagcgaagcgcgcggcgggcgggagcaagcttcgtttagtgaaccgtcagatcgcctggagacgccatccacgctgttttgacctccatagaagacaccgggaccgatccagcctccgcggattcgaatcccggccgggaacggtgcattggaacgcggattccccgtgccaagagtgacgtaagtaccgcctatagagtctataggcccacaaaaaatgctttcttcttttaatatacttttttgtttatcttatttctaatactttccctaatctctttctttcagggcaataatgatacaatgtatcatgcctctttgcaccattctaaagaataacagtgataatttctgggttaaggcaatagcaatatttctgcatataaatatttctgcatataaattgtaactgatgtaagaggtttcatattgctaatagcagctacaatccagctaccattctgcttttattttatggttgggataaggctggattattctgagtccaagctaggcccttttgctaatcatgttcatacctcttatcttcctcccacagctcctgggcaacgtgctggtctgtgtgctggcccatcactttggcaaagaattgggattcgaaccggtgtgctgggcggggggcggcgggccctcccgcagaacaccatgcgctcttcggaaggctttggctcgggacttacctgtgacctggtaagtcccgagccaaagccttctgaggagcgccttgacagcagccatgggagggccgccccctacctcagtgactcgaggggtggcatccctgtgacccctccccagtgcctctcctggccctggaagttgccactccagtgcccaccagccttgtcctaataaaattaagttgcatcattttgtctgactaggtgtccttctataatattatggggtggaggggggtggtatggagcaaggggcaagttgggaagacaacctgtagggcctgcggggtctattgggaaccaagctggagtgcagtggcacaatcttggctcactgcaatctccgcctcctgggttcaagcgattctcctgcctcagcctcccgagttgttgggattccaggcatgcatgaccaggctcagctaatttttgtttttttggtagagacggggtttcaccatattggccaggctggtctccaactcctaatctcaggtgatctacccaccttggcctcccaaattgctgggattacaggcgtgaaccactgctcccttccctgtccttatcgatgcctagggttaatcattaactacaaggaacccctagtgatggagttggccactccctctctgcgcgctcgctcgctcactgaggccgggcgaccaaaggtcgcccgacgcccgggctttgcccgggcggcctcagtgagcgagcgagcgcgcag

SEQ ID NO: 5182 - DNA, 2198 bp, synthetic construct
  source 1..2198: mol_type = other DNA
ctgcgcgctcgctcgctcactgaggccgcccgggcaaagcccgggcgtcgggcgacctttggtcgcccggcctcagtgagcgagcgagcgcgcagagagggagtgtagccatgctctaggaagatcaattcaattcacgcgtcgacattgattattgactagttattaatagtaatcaattacggggtcattagttcatagcccatatatggagttccgcgttacataacttacggtaaatggcccgcctggctgaccgcccaacgacccccgcccattgacgtcaataatgacgtatgttcccatagtaacgccaatagggactttccattgacgtcaatgggtggagtatttacggtaaactgcccacttggcagtacatcaagtgtatcatatgccaagtacgccccctattgacgtcaatgacggtaaatggcccgcctggcattatgcccagtacatgaccttatgggactttcctacttggcagtacatctacgtattagtcatcgctattaccatgtcgaggccacgttctgcttcactctccccatctcccccccctccccacccccaattttgtatttatttattttttaattattttgtgcagcgatgggggcggggggggggggcgcgcgccaggcggggcggggcggggcgaggggcggggcggggcgaggcggagaggtgcggcggcagccaatcagagcggcgcgctccgaaagtttccttttatggcgaggcggcggcggcggcggccctataaaaagcgaagcgcgcggcgggcgggagcaagcttcgtttagtgaaccgtcagatcgcctggagacgccatccacgctgttttgacctccatagaagacaccgggaccgatccagcctccgcggattcgaatcccggccgggaacggtgcattggaacgcggattccccgtgccaagagtgacgtaagtaccgcctatagagtctataggcccacaaaaaatgctttcttcttttaatatacttttttgtttatcttatttctaatactttccctaatctctttctttcagggcaataatgatacaatgtatcatgcctctttgcaccattctaaagaataacagtgataatttctgggttaaggcaatagcaatatttctgcatataaatatttctgcatataaattgtaactgatgtaagaggtttcatattgctaatagcagctacaatccagctaccattctgcttttattttatggttgggataaggctggattattctgagtccaagctaggcccttttgctaatcatgttcatacctcttatcttcctcccacagctcctgggcaacgtgctggtctgtgtgctggcccatcactttggcaaagaattgggattcgaaccggtgtgctgggcggggggcggcgggccctcccgcagaacaccatgcgctcttcggaagactggaagcgatgacaatcctgtgatttggtttgtcatcgcttccagtcttctgaggagcgccttgacagcagccatgggagggccgccccctacctcagtgactcgaggggtggcatccctgtgacccctccccagtgcctctcctggccctggaagttgccactccagtgcccaccagccttgtcctaataaaattaagttgcatcattttgtctgactaggtgtccttctataatattatggggtggaggggggtggtatggagcaaggggcaagttgggaagacaacctgtagggcctgcggggtctattgggaaccaagctggagtgcagtggcacaatcttggctcactgcaatctccgcctcctgggttcaagcgattctcctgcctcagcctcccgagttgttgggattccaggcatgcatgaccaggctcagctaatttttgtttttttggtagagacggggtttcaccatattggccaggctggtctccaactcctaatctcaggtgatctacccaccttggcctcccaaattgctgggattacaggcgtgaaccactgctcccttccctgtccttatcgatgcctagggttaatcattaactacaaggaacccctagtgatggagttggccactccctctctgcgcgctcgctcgctcactgaggccgggcgaccaaaggtcgcccgacgcccgggctttgcccgggcggcctcagtgagcgagcgagcgcgcag

SEQ ID NO: 5183 - DNA, 2198 bp, synthetic construct
  source 1..2198: mol_type = other DNA
ctgcgcgctcgctcgctcactgaggccgcccgggcaaagcccgggcgtcgggcgacctttggtcgcccggcctcagtgagcgagcgagcgcgcagagagggagtgtagccatgctctaggaagatcaattcaattcacgcgtcgacattgattattgactagttattaatagtaatcaattacggggtcattagttcatagcccatatatggagttccgcgttacataacttacggtaaatggcccgcctggctgaccgcccaacgacccccgcccattgacgtcaataatgacgtatgttcccatagtaacgccaatagggactttccattgacgtcaatgggtggagtatttacggtaaactgcccacttggcagtacatcaagtgtatcatatgccaagtacgccccctattgacgtcaatgacggtaaatggcccgcctggcattatgcccagtacatgaccttatgggactttcctacttggcagtacatctacgtattagtcatcgctattaccatgtcgaggccacgttctgcttcactctccccatctcccccccctccccacccccaattttgtatttatttattttttaattattttgtgcagcgatgggggcggggggggggggcgcgcgccaggcggggcggggcggggcgaggggcggggcggggcgaggcggagaggtgcggcggcagccaatcagagcggcgcgctccgaaagtttccttttatggcgaggcggcggcggcggcggccctataaaaagcgaagcgcgcggcgggcgggagcaagcttcgtttagtgaaccgtcagatcgcctggagacgccatccacgctgttttgacctccatagaagacaccgggaccgatccagcctccgcggattcgaatcccggccgggaacggtgcattggaacgcggattccccgtgccaagagtgacgtaagtaccgcctatagagtctataggcccacaaaaaatgctttcttcttttaatatacttttttgtttatcttatttctaatactttccctaatctctttctttcagggcaataatgatacaatgtatcatgcctctttgcaccattctaaagaataacagtgataatttctgggttaaggcaatagcaatatttctgcatataaatatttctgcatataaattgtaactgatgtaagaggtttcatattgctaatagcagctacaatccagctaccattctgcttttattttatggttgggataaggctggattattctgagtccaagctaggcccttttgctaatcatgttcatacctcttatcttcctcccacagctcctgggcaacgtgctggtctgtgtgctggcccatcactttggcaaagaattgggattcgaaccggtgtgctgggcggggggcggcgggccctcccgcagaacaccatgcgctcttcggaacttccgcgagaacgccaatcctgtgatttggtttggcgttctcgcggaagttctgaggagcgccttgacagcagccatgggagggccgccccctacctcagtgactcgaggggtggcatccctgtgacccctccccagtgcctctcctggccctggaagttgccactccagtgcccaccagccttgtcctaataaaattaagttgcatcattttgtctgactaggtgtccttctataatattatggggtggaggggggtggtatggagcaaggggcaagttgggaagacaacctgtagggcctgcggggtctattgggaaccaagctggagtgcagtggcacaatcttggctcactgcaatctccgcctcctgggttcaagcgattctcctgcctcagcctcccgagttgttgggattccaggcatgcatgaccaggctcagctaatttttgtttttttggtagagacggggtttcaccatattggccaggctggtctccaactcctaatctcaggtgatctacccaccttggcctcccaaattgctgggattacaggcgtgaaccactgctcccttccctgtccttatcgatgcctagggttaatcattaactacaaggaacccctagtgatggagttggccactccctctctgcgcgctcgctcgctcactgaggccgggcgaccaaaggtcgcccgacgcccgggctttgcccgggcggcctcagtgagcgagcgagcgcgcag

SEQ ID NO: 5184 - DNA, 2198 bp, synthetic construct
  source 1..2198: mol_type = other DNA
ctgcgcgctcgctcgctcactgaggccgcccgggcaaagcccgggcgtcgggcgacctttggtcgcccggcctcagtgagcgagcgagcgcgcagagagggagtgtagccatgctctaggaagatcaattcaattcacgcgtcgacattgattattgactagttattaatagtaatcaattacggggtcattagttcatagcccatatatggagttccgcgttacataacttacggtaaatggcccgcctggctgaccgcccaacgacccccgcccattgacgtcaataatgacgtatgttcccatagtaacgccaatagggactttccattgacgtcaatgggtggagtatttacggtaaactgcccacttggcagtacatcaagtgtatcatatgccaagtacgccccctattgacgtcaatgacggtaaatggcccgcctggcattatgcccagtacatgaccttatgggactttcctacttggcagtacatctacgtattagtcatcgctattaccatgtcgaggccacgttctgcttcactctccccatctcccccccctccccacccccaattttgtatttatttattttttaattattttgtgcagcgatgggggcggggggggggggcgcgcgccaggcggggcggggcggggcgaggggcggggcggggcgaggcggagaggtgcggcggcagccaatcagagcggcgcgctccgaaagtttccttttatggcgaggcggcggcggcggcggccctataaaaagcgaagcgcgcggcgggcgggagcaagcttcgtttagtgaaccgtcagatcgcctggagacgccatccacgctgttttgacctccatagaagacaccgggaccgatccagcctccgcggattcgaatcccggccgggaacggtgcattggaacgcggattccccgtgccaagagtgacgtaagtaccgcctatagagtctataggcccacaaaaaatgctttcttcttttaatatacttttttgtttatcttatttctaatactttccctaatctctttctttcagggcaataatgatacaatgtatcatgcctctttgcaccattctaaagaataacagtgataatttctgggttaaggcaatagcaatatttctgcatataaatatttctgcatataaattgtaactgatgtaagaggtttcatattgctaatagcagctacaatccagctaccattctgcttttattttatggttgggataaggctggattattctgagtccaagctaggcccttttgctaatcatgttcatacctcttatcttcctcccacagctcctgggcaacgtgctggtctgtgtgctggcccatcactttggcaaagaattgggattcgaaccggtgtgctgggcggggggcggcgggccctcccgcagaacaccatgcgctcttcggaagctcctcgcagttcggtttcctgtgatttggtaaccgaactgcgaggagcttctgaggagcgccttgacagcagccatgggagggccgccccctacctcagtgactcgaggggtggcatccctgtgacccctccccagtgcctctcctggccctggaagttgccactccagtgcccaccagccttgtcctaataaaattaagttgcatcattttgtctgactaggtgtccttctataatattatggggtggaggggggtggtatggagcaaggggcaagttgggaagacaacctgtagggcctgcggggtctattgggaaccaagctggagtgcagtggcacaatcttggctcactgcaatctccgcctcctgggttcaagcgattctcctgcctcagcctcccgagttgttgggattccaggcatgcatgaccaggctcagctaatttttgtttttttggtagagacggggtttcaccatattggccaggctggtctccaactcctaatctcaggtgatctacccaccttggcctcccaaattgctgggattacaggcgtgaaccactgctcccttccctgtccttatcgatgcctagggttaatcattaactacaaggaacccctagtgatggagttggccactccctctctgcgcgctcgctcgctcactgaggccgggcgaccaaaggtcgcccgacgcccgggctttgcccgggcggcctcagtgagcgagcgagcgcgcag

SEQ ID NO: 5185 - DNA, 2198 bp, synthetic construct
  source 1..2198: mol_type = other DNA
ctgcgcgctcgctcgctcactgaggccgcccgggcaaagcccgggcgtcgggcgacctttggtcgcccggcctcagtgagcgagcgagcgcgcagagagggagtgtagccatgctctaggaagatcaattcaattcacgcgtcgacattgattattgactagttattaatagtaatcaattacggggtcattagttcatagcccatatatggagttccgcgttacataacttacggtaaatggcccgcctggctgaccgcccaacgacccccgcccattgacgtcaataatgacgtatgttcccatagtaacgccaatagggactttccattgacgtcaatgggtggagtatttacggtaaactgcccacttggcagtacatcaagtgtatcatatgccaagtacgccccctattgacgtcaatgacggtaaatggcccgcctggcattatgcccagtacatgaccttatgggactttcctacttggcagtacatctacgtattagtcatcgctattaccatgtcgaggccacgttctgcttcactctccccatctcccccccctccccacccccaattttgtatttatttattttttaattattttgtgcagcgatgggggcggggggggggggcgcgcgccaggcggggcggggcggggcgaggggcggggcggggcgaggcggagaggtgcggcggcagccaatcagagcggcgcgctccgaaagtttccttttatggcgaggcggcggcggcggcggccctataaaaagcgaagcgcgcggcgggcgggagcaagcttcgtttagtgaaccgtcagatcgcctggagacgccatccacgctgttttgacctccatagaagacaccgggaccgatccagcctccgcggattcgaatcccggccgggaacggtgcattggaacgcggattccccgtgccaagagtgacgtaagtaccgcctatagagtctataggcccacaaaaaatgctttcttcttttaatatacttttttgtttatcttatttctaatactttccctaatctctttctttcagggcaataatgatacaatgtatcatgcctctttgcaccattctaaagaataacagtgataatttctgggttaaggcaatagcaatatttctgcatataaatatttctgcatataaattgtaactgatgtaagaggtttcatattgctaatagcagctacaatccagctaccattctgcttttattttatggttgggataaggctggattattctgagtccaagctaggcccttttgctaatcatgttcatacctcttatcttcctcccacagctcctgggcaacgtgctggtctgtgtgctggcccatcactttggcaaagaattgggattcgaaccggtgtgctgggcggggggcggcgggccctcccgcagaacaccatgcgctcttcggaaggctttggctcgggactttcctgtgatttggtaagtcccgagccaaagccttctgaggagcgccttgacagcagccatgggagggccgccccctacctcagtgactcgaggggtggcatccctgtgacccctccccagtgcctctcctggccctggaagttgccactccagtgcccaccagccttgtcctaataaaattaagttgcatcattttgtctgactaggtgtccttctataatattatggggtggaggggggtggtatggagcaaggggcaagttgggaagacaacctgtagggcctgcggggtctattgggaaccaagctggagtgcagtggcacaatcttggctcactgcaatctccgcctcctgggttcaagcgattctcctgcctcagcctcccgagttgttgggattccaggcatgcatgaccaggctcagctaatttttgtttttttggtagagacggggtttcaccatattggccaggctggtctccaactcctaatctcaggtgatctacccaccttggcctcccaaattgctgggattacaggcgtgaaccactgctcccttccctgtccttatcgatgcctagggttaatcattaactacaaggaacccctagtgatggagttggccactccctctctgcgcgctcgctcgctcactgaggccgggcgaccaaaggtcgcccgacgcccgggctttgcccgggcggcctcagtgagcgagcgagcgcgcag

SEQ ID NO: 5186 - DNA, 2198 bp, synthetic construct
  source 1..2198: mol_type = other DNA
ctgcgcgctcgctcgctcactgaggccgcccgggcaaagcccgggcgtcgggcgacctttggtcgcccggcctcagtgagcgagcgagcgcgcagagagggagtgtagccatgctctaggaagatcaattcaattcacgcgtcgacattgattattgactagttattaatagtaatcaattacggggtcattagttcatagcccatatatggagttccgcgttacataacttacggtaaatggcccgcctggctgaccgcccaacgacccccgcccattgacgtcaataatgacgtatgttcccatagtaacgccaatagggactttccattgacgtcaatgggtggagtatttacggtaaactgcccacttggcagtacatcaagtgtatcatatgccaagtacgccccctattgacgtcaatgacggtaaatggcccgcctggcattatgcccagtacatgaccttatgggactttcctacttggcagtacatctacgtattagtcatcgctattaccatgtcgaggccacgttctgcttcactctccccatctcccccccctccccacccccaattttgtatttatttattttttaattattttgtgcagcgatgggggcggggggggggggcgcgcgccaggcggggcggggcggggcgaggggcggggcggggcgaggcggagaggtgcggcggcagccaatcagagcggcgcgctccgaaagtttccttttatggcgaggcggcggcggcggcggccctataaaaagcgaagcgcgcggcgggcgggagcaagcttcgtttagtgaaccgtcagatcgcctggagacgccatccacgctgttttgacctccatagaagacaccgggaccgatccagcctccgcggattcgaatcccggccgggaacggtgcattggaacgcggattccccgtgccaagagtgacgtaagtaccgcctatagagtctataggcccacaaaaaatgctttcttcttttaatatacttttttgtttatcttatttctaatactttccctaatctctttctttcagggcaataatgatacaatgtatcatgcctctttgcaccattctaaagaataacagtgataatttctgggttaaggcaatagcaatatttctgcatataaatatttctgcatataaattgtaactgatgtaagaggtttcatattgctaatagcagctacaatccagctaccattctgcttttattttatggttgggataaggctggattattctgagtccaagctaggcccttttgctaatcatgttcatacctcttatcttcctcccacagctcctgggcaacgtgctggtctgtgtgctggcccatcactttggcaaagaattgggattcgaaccggtgtgctgggcggggggcggcgggccctcccgcagaacaccatgcgctcttcggaagactggaagggatgacaaccctgtgacctggtttgtcatcgcttccagtcttctgtggagcgccttgacagcagccatgggagggccgccccctacctcagtgactcgaggggtggcatccctgtgacccctccccagtgcctctcctggccctggaagttgccactccagtgcccaccagccttgtcctaataaaattaagttgcatcattttgtctgactaggtgtccttctataatattatggggtggaggggggtggtatggagcaaggggcaagttgggaagacaacctgtagggcctgcggggtctattgggaaccaagctggagtgcagtggcacaatcttggctcactgcaatctccgcctcctgggttcaagcgattctcctgcctcagcctcccgagttgttgggattccaggcatgcatgaccaggctcagctaatttttgtttttttggtagagacggggtttcaccatattggccaggctggtctccaactcctaatctcaggtgatctacccaccttggcctcccaaattgctgggattacaggcgtgaaccactgctcccttccctgtccttatcgatgcctagggttaatcattaactacaaggaacccctagtgatggagttggccactccctctctgcgcgctcgctcgctcactgaggccgggcgaccaaaggtcgcccgacgcccgggctttgcccgggcggcctcagtgagcgagcgagcgcgcag

SEQ ID NO: 5187 - DNA, 2198 bp, synthetic construct
  source 1..2198: mol_type = other DNA
ctgcgcgctcgctcgctcactgaggccgcccgggcaaagcccgggcgtcgggcgacctttggtcgcccggcctcagtgagcgagcgagcgcgcagagagggagtgtagccatgctctaggaagatcaattcaattcacgcgtcgacattgattattgactagttattaatagtaatcaattacggggtcattagttcatagcccatatatggagttccgcgttacataacttacggtaaatggcccgcctggctgaccgcccaacgacccccgcccattgacgtcaataatgacgtatgttcccatagtaacgccaatagggactttccattgacgtcaatgggtggagtatttacggtaaactgcccacttggcagtacatcaagtgtatcatatgccaagtacgccccctattgacgtcaatgacggtaaatggcccgcctggcattatgcccagtacatgaccttatgggactttcctacttggcagtacatctacgtattagtcatcgctattaccatgtcgaggccacgttctgcttcactctccccatctcccccccctccccacccccaattttgtatttatttattttttaattattttgtgcagcgatgggggcggggggggggggcgcgcgccaggcggggcggggcggggcgaggggcggggcggggcgaggcggagaggtgcggcggcagccaatcagagcggcgcgctccgaaagtttccttttatggcgaggcggcggcggcggcggccctataaaaagcgaagcgcgcggcgggcgggagcaagcttcgtttagtgaaccgtcagatcgcctggagacgccatccacgctgttttgacctccatagaagacaccgggaccgatccagcctccgcggattcgaatcccggccgggaacggtgcattggaacgcggattccccgtgccaagagtgacgtaagtaccgcctatagagtctataggcccacaaaaaatgctttcttcttttaatatacttttttgtttatcttatttctaatactttccctaatctctttctttcagggcaataatgatacaatgtatcatgcctctttgcaccattctaaagaataacagtgataatttctgggttaaggcaatagcaatatttctgcatataaatatttctgcatataaattgtaactgatgtaagaggtttcatattgctaatagcagctacaatccagctaccattctgcttttattttatggttgggataaggctggattattctgagtccaagctaggcccttttgctaatcatgttcatacctcttatcttcctcccacagctcctgggcaacgtgctggtctgtgtgctggcccatcactttggcaaagaattgggattcgaaccggtgtgctgggcggggggcggcgggccctcccgcagaacaccatgcgctcttcggaacttccgcgacaacgccaaccctgtgacctggtttggcgttctcgcggaagttctgtggagcgccttgacagcagccatgggagggccgccccctacctcagtgactcgaggggtggcatccctgtgacccctccccagtgcctctcctggccctggaagttgccactccagtgcccaccagccttgtcctaataaaattaagttgcatcattttgtctgactaggtgtccttctataatattatggggtggaggggggtggtatggagcaaggggcaagttgggaagacaacctgtagggcctgcggggtctattgggaaccaagctggagtgcagtggcacaatcttggctcactgcaatctccgcctcctgggttcaagcgattctcctgcctcagcctcccgagttgttgggattccaggcatgcatgaccaggctcagctaatttttgtttttttggtagagacggggtttcaccatattggccaggctggtctccaactcctaatctcaggtgatctacccaccttggcctcccaaattgctgggattacaggcgtgaaccactgctcccttccctgtccttatcgatgcctagggttaatcattaactacaaggaacccctagtgatggagttggccactccctctctgcgcgctcgctcgctcactgaggccgggcgaccaaaggtcgcccgacgcccgggctttgcccgggcggcctcagtgagcgagcgagcgcgcag

SEQ ID NO: 5188 - DNA, 2198 bp, synthetic construct
  source 1..2198: mol_type = other DNA
ctgcgcgctcgctcgctcactgaggccgcccgggcaaagcccgggcgtcgggcgacctttggtcgcccggcctcagtgagcgagcgagcgcgcagagagggagtgtagccatgctctaggaagatcaattcaattcacgcgtcgacattgattattgactagttattaatagtaatcaattacggggtcattagttcatagcccatatatggagttccgcgttacataacttacggtaaatggcccgcctggctgaccgcccaacgacccccgcccattgacgtcaataatgacgtatgttcccatagtaacgccaatagggactttccattgacgtcaatgggtggagtatttacggtaaactgcccacttggcagtacatcaagtgtatcatatgccaagtacgccccctattgacgtcaatgacggtaaatggcccgcctggcattatgcccagtacatgaccttatgggactttcctacttggcagtacatctacgtattagtcatcgctattaccatgtcgaggccacgttctgcttcactctccccatctcccccccctccccacccccaattttgtatttatttattttttaattattttgtgcagcgatgggggcggggggggggggcgcgcgccaggcggggcggggcggggcgaggggcggggcggggcgaggcggagaggtgcggcggcagccaatcagagcggcgcgctccgaaagtttccttttatggcgaggcggcggcggcggcggccctataaaaagcgaagcgcgcggcgggcgggagcaagcttcgtttagtgaaccgtcagatcgcctggagacgccatccacgctgttttgacctccatagaagacaccgggaccgatccagcctccgcggattcgaatcccggccgggaacggtgcattggaacgcggattccccgtgccaagagtgacgtaagtaccgcctatagagtctataggcccacaaaaaatgctttcttcttttaatatacttttttgtttatcttatttctaatactttccctaatctctttctttcagggcaataatgatacaatgtatcatgcctctttgcaccattctaaagaataacagtgataatttctgggttaaggcaatagcaatatttctgcatataaatatttctgcatataaattgtaactgatgtaagaggtttcatattgctaatagcagctacaatccagctaccattctgcttttattttatggttgggataaggctggattattctgagtccaagctaggcccttttgctaatcatgttcatacctcttatcttcctcccacagctcctgggcaacgtgctggtctgtgtgctggcccatcactttggcaaagaattgggattcgaaccggtgtgctgggcggggggcggcgggccctcccgcagaacaccatgcgctcttcggaagctcctcgctgttcggttccctgtgacctggtaaccgaactgcgaggagcttctgtggagcgccttgacagcagccatgggagggccgccccctacctcagtgactcgaggggtggcatccctgtgacccctccccagtgcctctcctggccctggaagttgccactccagtgcccaccagccttgtcctaataaaattaagttgcatcattttgtctgactaggtgtccttctataatattatggggtggaggggggtggtatggagcaaggggcaagttgggaagacaacctgtagggcctgcggggtctattgggaaccaagctggagtgcagtggcacaatcttggctcactgcaatctccgcctcctgggttcaagcgattctcctgcctcagcctcccgagttgttgggattccaggcatgcatgaccaggctcagctaatttttgtttttttggtagagacggggtttcaccatattggccaggctggtctccaactcctaatctcaggtgatctacccaccttggcctcccaaattgctgggattacaggcgtgaaccactgctcccttccctgtccttatcgatgcctagggttaatcattaactacaaggaacccctagtgatggagttggccactccctctctgcgcgctcgctcgctcactgaggccgggcgaccaaaggtcgcccgacgcccgggctttgcccgggcggcctcagtgagcgagcgagcgcgcag

SEQ ID NO: 5189 - DNA, 2198 bp, synthetic construct
  source 1..2198: mol_type = other DNA
ctgcgcgctcgctcgctcactgaggccgcccgggcaaagcccgggcgtcgggcgacctttggtcgcccggcctcagtgagcgagcgagcgcgcagagagggagtgtagccatgctctaggaagatcaattcaattcacgcgtcgacattgattattgactagttattaatagtaatcaattacggggtcattagttcatagcccatatatggagttccgcgttacataacttacggtaaatggcccgcctggctgaccgcccaacgacccccgcccattgacgtcaataatgacgtatgttcccatagtaacgccaatagggactttccattgacgtcaatgggtggagtatttacggtaaactgcccacttggcagtacatcaagtgtatcatatgccaagtacgccccctattgacgtcaatgacggtaaatggcccgcctggcattatgcccagtacatgaccttatgggactttcctacttggcagtacatctacgtattagtcatcgctattaccatgtcgaggccacgttctgcttcactctccccatctcccccccctccccacccccaattttgtatttatttattttttaattattttgtgcagcgatgggggcggggggggggggcgcgcgccaggcggggcggggcggggcgaggggcggggcggggcgaggcggagaggtgcggcggcagccaatcagagcggcgcgctccgaaagtttccttttatggcgaggcggcggcggcggcggccctataaaaagcgaagcgcgcggcgggcgggagcaagcttcgtttagtgaaccgtcagatcgcctggagacgccatccacgctgttttgacctccatagaagacaccgggaccgatccagcctccgcggattcgaatcccggccgggaacggtgcattggaacgcggattccccgtgccaagagtgacgtaagtaccgcctatagagtctataggcccacaaaaaatgctttcttcttttaatatacttttttgtttatcttatttctaatactttccctaatctctttctttcagggcaataatgatacaatgtatcatgcctctttgcaccattctaaagaataacagtgataatttctgggttaaggcaatagcaatatttctgcatataaatatttctgcatataaattgtaactgatgtaagaggtttcatattgctaatagcagctacaatccagctaccattctgcttttattttatggttgggataaggctggattattctgagtccaagctaggcccttttgctaatcatgttcatacctcttatcttcctcccacagctcctgggcaacgtgctggtctgtgtgctggcccatcactttggcaaagaattgggattcgaaccggtgtgctgggcggggggcggcgggccctcccgcagaacaccatgcgctcttcggaaggctttggcacgggacttccctgtgacctggtaagtcccgagccaaagccttctgtggagcgccttgacagcagccatgggagggccgccccctacctcagtgactcgaggggtggcatccctgtgacccctccccagtgcctctcctggccctggaagttgccactccagtgcccaccagccttgtcctaataaaattaagttgcatcattttgtctgactaggtgtccttctataatattatggggtggaggggggtggtatggagcaaggggcaagttgggaagacaacctgtagggcctgcggggtctattgggaaccaagctggagtgcagtggcacaatcttggctcactgcaatctccgcctcctgggttcaagcgattctcctgcctcagcctcccgagttgttgggattccaggcatgcatgaccaggctcagctaatttttgtttttttggtagagacggggtttcaccatattggccaggctggtctccaactcctaatctcaggtgatctacccaccttggcctcccaaattgctgggattacaggcgtgaaccactgctcccttccctgtccttatcgatgcctagggttaatcattaactacaaggaacccctagtgatggagttggccactccctctctgcgcgctcgctcgctcactgaggccgggcgaccaaaggtcgcccgacgcccgggctttgcccgggcggcctcagtgagcgagcgagcgcgcag

SEQ ID NO: 5190 - DNA, 2198 bp, synthetic construct
  source 1..2198: mol_type = other DNA
ctgcgcgctcgctcgctcactgaggccgcccgggcaaagcccgggcgtcgggcgacctttggtcgcccggcctcagtgagcgagcgagcgcgcagagagggagtgtagccatgctctaggaagatcaattcaattcacgcgtcgacattgattattgactagttattaatagtaatcaattacggggtcattagttcatagcccatatatggagttccgcgttacataacttacggtaaatggcccgcctggctgaccgcccaacgacccccgcccattgacgtcaataatgacgtatgttcccatagtaacgccaatagggactttccattgacgtcaatgggtggagtatttacggtaaactgcccacttggcagtacatcaagtgtatcatatgccaagtacgccccctattgacgtcaatgacggtaaatggcccgcctggcattatgcccagtacatgaccttatgggactttcctacttggcagtacatctacgtattagtcatcgctattaccatgtcgaggccacgttctgcttcactctccccatctcccccccctccccacccccaattttgtatttatttattttttaattattttgtgcagcgatgggggcggggggggggggcgcgcgccaggcggggcggggcggggcgaggggcggggcggggcgaggcggagaggtgcggcggcagccaatcagagcggcgcgctccgaaagtttccttttatggcgaggcggcggcggcggcggccctataaaaagcgaagcgcgcggcgggcgggagcaagcttcgtttagtgaaccgtcagatcgcctggagacgccatccacgctgttttgacctccatagaagacaccgggaccgatccagcctccgcggattcgaatcccggccgggaacggtgcattggaacgcggattccccgtgccaagagtgacgtaagtaccgcctatagagtctataggcccacaaaaaatgctttcttcttttaatatacttttttgtttatcttatttctaatactttccctaatctctttctttcagggcaataatgatacaatgtatcatgcctctttgcaccattctaaagaataacagtgataatttctgggttaaggcaatagcaatatttctgcatataaatatttctgcatataaattgtaactgatgtaagaggtttcatattgctaatagcagctacaatccagctaccattctgcttttattttatggttgggataaggctggattattctgagtccaagctaggcccttttgctaatcatgttcatacctcttatcttcctcccacagctcctgggcaacgtgctggtctgtgtgctggcccatcactttggcaaagaattgggattcgaaccggtgtgctgggcggggggcggcgggccctcccgcagaacaccatgcgctcttcggaagactggaagcgatgacaagcctgtgacctggtttgtcatcgcttccagtcttctgtggagcgccttgacagcagccatgggagggccgccccctacctcagtgactcgaggggtggcatccctgtgacccctccccagtgcctctcctggccctggaagttgccactccagtgcccaccagccttgtcctaataaaattaagttgcatcattttgtctgactaggtgtccttctataatattatggggtggaggggggtggtatggagcaaggggcaagttgggaagacaacctgtagggcctgcggggtctattgggaaccaagctggagtgcagtggcacaatcttggctcactgcaatctccgcctcctgggttcaagcgattctcctgcctcagcctcccgagttgttgggattccaggcatgcatgaccaggctcagctaatttttgtttttttggtagagacggggtttcaccatattggccaggctggtctccaactcctaatctcaggtgatctacccaccttggcctcccaaattgctgggattacaggcgtgaaccactgctcccttccctgtccttatcgatgcctagggttaatcattaactacaaggaacccctagtgatggagttggccactccctctctgcgcgctcgctcgctcactgaggccgggcgaccaaaggtcgcccgacgcccgggctttgcccgggcggcctcagtgagcgagcgagcgcgcag

SEQ ID NO: 5191 - DNA, 2198 bp, synthetic construct
  source 1..2198: mol_type = other DNA
ctgcgcgctcgctcgctcactgaggccgcccgggcaaagcccgggcgtcgggcgacctttggtcgcccggcctcagtgagcgagcgagcgcgcagagagggagtgtagccatgctctaggaagatcaattcaattcacgcgtcgacattgattattgactagttattaatagtaatcaattacggggtcattagttcatagcccatatatggagttccgcgttacataacttacggtaaatggcccgcctggctgaccgcccaacgacccccgcccattgacgtcaataatgacgtatgttcccatagtaacgccaatagggactttccattgacgtcaatgggtggagtatttacggtaaactgcccacttggcagtacatcaagtgtatcatatgccaagtacgccccctattgacgtcaatgacggtaaatggcccgcctggcattatgcccagtacatgaccttatgggactttcctacttggcagtacatctacgtattagtcatcgctattaccatgtcgaggccacgttctgcttcactctccccatctcccccccctccccacccccaattttgtatttatttattttttaattattttgtgcagcgatgggggcggggggggggggcgcgcgccaggcggggcggggcggggcgaggggcggggcggggcgaggcggagaggtgcggcggcagccaatcagagcggcgcgctccgaaagtttccttttatggcgaggcggcggcggcggcggccctataaaaagcgaagcgcgcggcgggcgggagcaagcttcgtttagtgaaccgtcagatcgcctggagacgccatccacgctgttttgacctccatagaagacaccgggaccgatccagcctccgcggattcgaatcccggccgggaacggtgcattggaacgcggattccccgtgccaagagtgacgtaagtaccgcctatagagtctataggcccacaaaaaatgctttcttcttttaatatacttttttgtttatcttatttctaatactttccctaatctctttctttcagggcaataatgatacaatgtatcatgcctctttgcaccattctaaagaataacagtgataatttctgggttaaggcaatagcaatatttctgcatataaatatttctgcatataaattgtaactgatgtaagaggtttcatattgctaatagcagctacaatccagctaccattctgcttttattttatggttgggataaggctggattattctgagtccaagctaggcccttttgctaatcatgttcatacctcttatcttcctcccacagctcctgggcaacgtgctggtctgtgtgctggcccatcactttggcaaagaattgggattcgaaccggtgtgctgggcggggggcggcgggccctcccgcagaacaccatgcgctcttcggaacttccgcgagaacgccaagcctgtgacctggtttggcgttctcgcggaagttctgtggagcgccttgacagcagccatgggagggccgccccctacctcagtgactcgaggggtggcatccctgtgacccctccccagtgcctctcctggccctggaagttgccactccagtgcccaccagccttgtcctaataaaattaagttgcatcattttgtctgactaggtgtccttctataatattatggggtggaggggggtggtatggagcaaggggcaagttgggaagacaacctgtagggcctgcggggtctattgggaaccaagctggagtgcagtggcacaatcttggctcactgcaatctccgcctcctgggttcaagcgattctcctgcctcagcctcccgagttgttgggattccaggcatgcatgaccaggctcagctaatttttgtttttttggtagagacggggtttcaccatattggccaggctggtctccaactcctaatctcaggtgatctacccaccttggcctcccaaattgctgggattacaggcgtgaaccactgctcccttccctgtccttatcgatgcctagggttaatcattaactacaaggaacccctagtgatggagttggccactccctctctgcgcgctcgctcgctcactgaggccgggcgaccaaaggtcgcccgacgcccgggctttgcccgggcggcctcagtgagcgagcgagcgcgcag

SEQ ID NO: 5192 - DNA, 2198 bp, synthetic construct
  source 1..2198: mol_type = other DNA
ctgcgcgctcgctcgctcactgaggccgcccgggcaaagcccgggcgtcgggcgacctttggtcgcccggcctcagtgagcgagcgagcgcgcagagagggagtgtagccatgctctaggaagatcaattcaattcacgcgtcgacattgattattgactagttattaatagtaatcaattacggggtcattagttcatagcccatatatggagttccgcgttacataacttacggtaaatggcccgcctggctgaccgcccaacgacccccgcccattgacgtcaataatgacgtatgttcccatagtaacgccaatagggactttccattgacgtcaatgggtggagtatttacggtaaactgcccacttggcagtacatcaagtgtatcatatgccaagtacgccccctattgacgtcaatgacggtaaatggcccgcctggcattatgcccagtacatgaccttatgggactttcctacttggcagtacatctacgtattagtcatcgctattaccatgtcgaggccacgttctgcttcactctccccatctcccccccctccccacccccaattttgtatttatttattttttaattattttgtgcagcgatgggggcggggggggggggcgcgcgccaggcggggcggggcggggcgaggggcggggcggggcgaggcggagaggtgcggcggcagccaatcagagcggcgcgctccgaaagtttccttttatggcgaggcggcggcggcggcggccctataaaaagcgaagcgcgcggcgggcgggagcaagcttcgtttagtgaaccgtcagatcgcctggagacgccatccacgctgttttgacctccatagaagacaccgggaccgatccagcctccgcggattcgaatcccggccgggaacggtgcattggaacgcggattccccgtgccaagagtgacgtaagtaccgcctatagagtctataggcccacaaaaaatgctttcttcttttaatatacttttttgtttatcttatttctaatactttccctaatctctttctttcagggcaataatgatacaatgtatcatgcctctttgcaccattctaaagaataacagtgataatttctgggttaaggcaatagcaatatttctgcatataaatatttctgcatataaattgtaactgatgtaagaggtttcatattgctaatagcagctacaatccagctaccattctgcttttattttatggttgggataaggctggattattctgagtccaagctaggcccttttgctaatcatgttcatacctcttatcttcctcccacagctcctgggcaacgtgctggtctgtgtgctggcccatcactttggcaaagaattgggattcgaaccggtgtgctgggcggggggcggcgggccctcccgcagaacaccatgcgctcttcggaagctcctcgcagttcggttgcctgtgacctggtaaccgaactgcgaggagcttctgtggagcgccttgacagcagccatgggagggccgccccctacctcagtgactcgaggggtggcatccctgtgacccctccccagtgcctctcctggccctggaagttgccactccagtgcccaccagccttgtcctaataaaattaagttgcatcattttgtctgactaggtgtccttctataatattatggggtggaggggggtggtatggagcaaggggcaagttgggaagacaacctgtagggcctgcggggtctattgggaaccaagctggagtgcagtggcacaatcttggctcactgcaatctccgcctcctgggttcaagcgattctcctgcctcagcctcccgagttgttgggattccaggcatgcatgaccaggctcagctaatttttgtttttttggtagagacggggtttcaccatattggccaggctggtctccaactcctaatctcaggtgatctacccaccttggcctcccaaattgctgggattacaggcgtgaaccactgctcccttccctgtccttatcgatgcctagggttaatcattaactacaaggaacccctagtgatggagttggccactccctctctgcgcgctcgctcgctcactgaggccgggcgaccaaaggtcgcccgacgcccgggctttgcccgggcggcctcagtgagcgagcgagcgcgcag

SEQ ID NO: 5193 - DNA, 2198 bp, synthetic construct
  source 1..2198: mol_type = other DNA
ctgcgcgctcgctcgctcactgaggccgcccgggcaaagcccgggcgtcgggcgacctttggtcgcccggcctcagtgagcgagcgagcgcgcagagagggagtgtagccatgctctaggaagatcaattcaattcacgcgtcgacattgattattgactagttattaatagtaatcaattacggggtcattagttcatagcccatatatggagttccgcgttacataacttacggtaaatggcccgcctggctgaccgcccaacgacccccgcccattgacgtcaataatgacgtatgttcccatagtaacgccaatagggactttccattgacgtcaatgggtggagtatttacggtaaactgcccacttggcagtacatcaagtgtatcatatgccaagtacgccccctattgacgtcaatgacggtaaatggcccgcctggcattatgcccagtacatgaccttatgggactttcctacttggcagtacatctacgtattagtcatcgctattaccatgtcgaggccacgttctgcttcactctccccatctcccccccctccccacccccaattttgtatttatttattttttaattattttgtgcagcgatgggggcggggggggggggcgcgcgccaggcggggcggggcggggcgaggggcggggcggggcgaggcggagaggtgcggcggcagccaatcagagcggcgcgctccgaaagtttccttttatggcgaggcggcggcggcggcggccctataaaaagcgaagcgcgcggcgggcgggagcaagcttcgtttagtgaaccgtcagatcgcctggagacgccatccacgctgttttgacctccatagaagacaccgggaccgatccagcctccgcggattcgaatcccggccgggaacggtgcattggaacgcggattccccgtgccaagagtgacgtaagtaccgcctatagagtctataggcccacaaaaaatgctttcttcttttaatatacttttttgtttatcttatttctaatactttccctaatctctttctttcagggcaataatgatacaatgtatcatgcctctttgcaccattctaaagaataacagtgataatttctgggttaaggcaatagcaatatttctgcatataaatatttctgcatataaattgtaactgatgtaagaggtttcatattgctaatagcagctacaatccagctaccattctgcttttattttatggttgggataaggctggattattctgagtccaagctaggcccttttgctaatcatgttcatacctcttatcttcctcccacagctcctgggcaacgtgctggtctgtgtgctggcccatcactttggcaaagaattgggattcgaaccggtgtgctgggcggggggcggcgggccctcccgcagaacaccatgcgctcttcggaaggctttggctcgggacttgcctgtgacctggtaagtcccgagccaaagccttctgtggagcgccttgacagcagccatgggagggccgccccctacctcagtgactcgaggggtggcatccctgtgacccctccccagtgcctctcctggccctggaagttgccactccagtgcccaccagccttgtcctaataaaattaagttgcatcattttgtctgactaggtgtccttctataatattatggggtggaggggggtggtatggagcaaggggcaagttgggaagacaacctgtagggcctgcggggtctattgggaaccaagctggagtgcagtggcacaatcttggctcactgcaatctccgcctcctgggttcaagcgattctcctgcctcagcctcccgagttgttgggattccaggcatgcatgaccaggctcagctaatttttgtttttttggtagagacggggtttcaccatattggccaggctggtctccaactcctaatctcaggtgatctacccaccttggcctcccaaattgctgggattacaggcgtgaaccactgctcccttccctgtccttatcgatgcctagggttaatcattaactacaaggaacccctagtgatggagttggccactccctctctgcgcgctcgctcgctcactgaggccgggcgaccaaaggtcgcccgacgcccgggctttgcccgggcggcctcagtgagcgagcgagcgcgcag

SEQ ID NO: 5194 - DNA, 2300 bp, synthetic construct
  source 1..2300: mol_type = other DNA
ctgcgcgctcgctcgctcactgaggccgcccgggcaaagcccgggcgtcgggcgacctttggtcgcccggcctcagtgagcgagcgagcgcgcagagagggagtgtagccatgctctaggaagatcaattcaattcacgcgtcgacattgattattgactagttattaatagtaatcaattacggggtcattagttcatagcccatatatggagttccgcgttacataacttacggtaaatggcccgcctggctgaccgcccaacgacccccgcccattgacgtcaataatgacgtatgttcccatagtaacgccaatagggactttccattgacgtcaatgggtggagtatttacggtaaactgcccacttggcagtacatcaagtgtatcatatgccaagtacgccccctattgacgtcaatgacggtaaatggcccgcctggcattatgcccagtacatgaccttatgggactttcctacttggcagtacatctacgtattagtcatcgctattaccatgtcgaggccacgttctgcttcactctccccatctcccccccctccccacccccaattttgtatttatttattttttaattattttgtgcagcgatgggggcggggggggggggcgcgcgccaggcggggcggggcggggcgaggggcggggcggggcgaggcggagaggtgcggcggcagccaatcagagcggcgcgctccgaaagtttccttttatggcgaggcggcggcggcggcggccctataaaaagcgaagcgcgcggcgggcgggagcaagcttcgtttagtgaaccgtcagatcgcctggagacgccatccacgctgttttgacctccatagaagacaccgggaccgatccagcctccgcggattcgaatcccggccgggaacggtgcattggaacgcggattccccgtgccaagagtgacgtaagtaccgcctatagagtctataggcccacaaaaaatgctttcttcttttaatatacttttttgtttatcttatttctaatactttccctaatctctttctttcagggcaataatgatacaatgtatcatgcctctttgcaccattctaaagaataacagtgataatttctgggttaaggcaatagcaatatttctgcatataaatatttctgcatataaattgtaactgatgtaagaggtttcatattgctaatagcagctacaatccagctaccattctgcttttattttatggttgggataaggctggattattctgagtccaagctaggcccttttgctaatcatgttcatacctcttatcttcctcccacagctcctgggcaacgtgctggtctgtgtgctggcccatcactttggcaaagaattgggattcgaaccggtgaagcaaagaaggggcagagggagcccgtgagctgagtgggccagggactgggagaaggagtgaggaggcagggccggcatgcctctgctgctggccagacttccgcgagaacgccaatctgtctgcacctgtcactagtttggcgttctcgcggaagtttggccgtgtagtgctacccagcgctggctgcctcctcagcattgcaattcctctcccatctgggcaccagtcagctaccctggtgggaatctgggtagccctcgaggggtggcatccctgtgacccctccccagtgcctctcctggccctggaagttgccactccagtgcccaccagccttgtcctaataaaattaagttgcatcattttgtctgactaggtgtccttctataatattatggggtggaggggggtggtatggagcaaggggcaagttgggaagacaacctgtagggcctgcggggtctattgggaaccaagctggagtgcagtggcacaatcttggctcactgcaatctccgcctcctgggttcaagcgattctcctgcctcagcctcccgagttgttgggattccaggcatgcatgaccaggctcagctaatttttgtttttttggtagagacggggtttcaccatattggccaggctggtctccaactcctaatctcaggtgatctacccaccttggcctcccaaattgctgggattacaggcgtgaaccactgctcccttccctgtccttatcgatgcctagggttaatcattaactacaaggaacccctagtgatggagttggccactccctctctgcgcgctcgctcgctcactgaggccgggcgaccaaaggtcgcccgacgcccgggctttgcccgggcggcctcagtgagcgagcgagcgcgcag

SEQ ID NO: 5195 - DNA, 2300 bp, synthetic construct
  source 1..2300: mol_type = other DNA
ctgcgcgctcgctcgctcactgaggccgcccgggcaaagcccgggcgtcgggcgacctttggtcgcccggcctcagtgagcgagcgagcgcgcagagagggagtgtagccatgctctaggaagatcaattcaattcacgcgtcgacattgattattgactagttattaatagtaatcaattacggggtcattagttcatagcccatatatggagttccgcgttacataacttacggtaaatggcccgcctggctgaccgcccaacgacccccgcccattgacgtcaataatgacgtatgttcccatagtaacgccaatagggactttccattgacgtcaatgggtggagtatttacggtaaactgcccacttggcagtacatcaagtgtatcatatgccaagtacgccccctattgacgtcaatgacggtaaatggcccgcctggcattatgcccagtacatgaccttatgggactttcctacttggcagtacatctacgtattagtcatcgctattaccatgtcgaggccacgttctgcttcactctccccatctcccccccctccccacccccaattttgtatttatttattttttaattattttgtgcagcgatgggggcggggggggggggcgcgcgccaggcggggcggggcggggcgaggggcggggcggggcgaggcggagaggtgcggcggcagccaatcagagcggcgcgctccgaaagtttccttttatggcgaggcggcggcggcggcggccctataaaaagcgaagcgcgcggcgggcgggagcaagcttcgtttagtgaaccgtcagatcgcctggagacgccatccacgctgttttgacctccatagaagacaccgggaccgatccagcctccgcggattcgaatcccggccgggaacggtgcattggaacgcggattccccgtgccaagagtgacgtaagtaccgcctatagagtctataggcccacaaaaaatgctttcttcttttaatatacttttttgtttatcttatttctaatactttccctaatctctttctttcagggcaataatgatacaatgtatcatgcctctttgcaccattctaaagaataacagtgataatttctgggttaaggcaatagcaatatttctgcatataaatatttctgcatataaattgtaactgatgtaagaggtttcatattgctaatagcagctacaatccagctaccattctgcttttattttatggttgggataaggctggattattctgagtccaagctaggcccttttgctaatcatgttcatacctcttatcttcctcccacagctcctgggcaacgtgctggtctgtgtgctggcccatcactttggcaaagaattgggattcgaaccggtgaagcaaagaaggggcagagggagcccgtgagctgagtgggccagggactgggagaaggagtgaggaggcagggccggcatgcctctgctgctggccagagctcctcgcagttcggtttctgtctgcacctgtcactagtaaccgaactgcgaggagctttggccgtgtagtgctacccagcgctggctgcctcctcagcattgcaattcctctcccatctgggcaccagtcagctaccctggtgggaatctgggtagccctcgaggggtggcatccctgtgacccctccccagtgcctctcctggccctggaagttgccactccagtgcccaccagccttgtcctaataaaattaagttgcatcattttgtctgactaggtgtccttctataatattatggggtggaggggggtggtatggagcaaggggcaagttgggaagacaacctgtagggcctgcggggtctattgggaaccaagctggagtgcagtggcacaatcttggctcactgcaatctccgcctcctgggttcaagcgattctcctgcctcagcctcccgagttgttgggattccaggcatgcatgaccaggctcagctaatttttgtttttttggtagagacggggtttcaccatattggccaggctggtctccaactcctaatctcaggtgatctacccaccttggcctcccaaattgctgggattacaggcgtgaaccactgctcccttccctgtccttatcgatgcctagggttaatcattaactacaaggaacccctagtgatggagttggccactccctctctgcgcgctcgctcgctcactgaggccgggcgaccaaaggtcgcccgacgcccgggctttgcccgggcggcctcagtgagcgagcgagcgcgcag

SEQ ID NO: 5196 - DNA, 2300 bp, synthetic construct
  source 1..2300: mol_type = other DNA
ctgcgcgctcgctcgctcactgaggccgcccgggcaaagcccgggcgtcgggcgacctttggtcgcccggcctcagtgagcgagcgagcgcgcagagagggagtgtagccatgctctaggaagatcaattcaattcacgcgtcgacattgattattgactagttattaatagtaatcaattacggggtcattagttcatagcccatatatggagttccgcgttacataacttacggtaaatggcccgcctggctgaccgcccaacgacccccgcccattgacgtcaataatgacgtatgttcccatagtaacgccaatagggactttccattgacgtcaatgggtggagtatttacggtaaactgcccacttggcagtacatcaagtgtatcatatgccaagtacgccccctattgacgtcaatgacggtaaatggcccgcctggcattatgcccagtacatgaccttatgggactttcctacttggcagtacatctacgtattagtcatcgctattaccatgtcgaggccacgttctgcttcactctccccatctcccccccctccccacccccaattttgtatttatttattttttaattattttgtgcagcgatgggggcggggggggggggcgcgcgccaggcggggcggggcggggcgaggggcggggcggggcgaggcggagaggtgcggcggcagccaatcagagcggcgcgctccgaaagtttccttttatggcgaggcggcggcggcggcggccctataaaaagcgaagcgcgcggcgggcgggagcaagcttcgtttagtgaaccgtcagatcgcctggagacgccatccacgctgttttgacctccatagaagacaccgggaccgatccagcctccgcggattcgaatcccggccgggaacggtgcattggaacgcggattccccgtgccaagagtgacgtaagtaccgcctatagagtctataggcccacaaaaaatgctttcttcttttaatatacttttttgtttatcttatttctaatactttccctaatctctttctttcagggcaataatgatacaatgtatcatgcctctttgcaccattctaaagaataacagtgataatttctgggttaaggcaatagcaatatttctgcatataaatatttctgcatataaattgtaactgatgtaagaggtttcatattgctaatagcagctacaatccagctaccattctgcttttattttatggttgggataaggctggattattctgagtccaagctaggcccttttgctaatcatgttcatacctcttatcttcctcccacagctcctgggcaacgtgctggtctgtgtgctggcccatcactttggcaaagaattgggattcgaaccggtgaagcaaagaaggggcagagggagcccgtgagctgagtgggccagggactgggagaaggagtgaggaggcagggccggcatgcctctgctgctggccagaggctttggctcgggactttctgtctgcacctgtcactagtaagtcccgagccaaagcctttggccgtgtagtgctacccagcgctggctgcctcctcagcattgcaattcctctcccatctgggcaccagtcagctaccctggtgggaatctgggtagccctcgaggggtggcatccctgtgacccctccccagtgcctctcctggccctggaagttgccactccagtgcccaccagccttgtcctaataaaattaagttgcatcattttgtctgactaggtgtccttctataatattatggggtggaggggggtggtatggagcaaggggcaagttgggaagacaacctgtagggcctgcggggtctattgggaaccaagctggagtgcagtggcacaatcttggctcactgcaatctccgcctcctgggttcaagcgattctcctgcctcagcctcccgagttgttgggattccaggcatgcatgaccaggctcagctaatttttgtttttttggtagagacggggtttcaccatattggccaggctggtctccaactcctaatctcaggtgatctacccaccttggcctcccaaattgctgggattacaggcgtgaaccactgctcccttccctgtccttatcgatgcctagggttaatcattaactacaaggaacccctagtgatggagttggccactccctctctgcgcgctcgctcgctcactgaggccgggcgaccaaaggtcgcccgacgcccgggctttgcccgggcggcctcagtgagcgagcgagcgcgcag

SEQ ID NO: 5197 - DNA, 105 bp, synthetic construct
  source 1..105: mol_type = other DNA
ctgcgcgctcgctcgctcactgaggccgcccgggcaaagcccgggcgtcgggcgacctttggtcgcccggcctcagtgagcgagcgagcgcgcagagagggagtg

SEQ ID NO: 5198 - DNA, 21 bp, synthetic construct
  source 1..21: mol_type = other DNA
  misc_feature 1..19: note = RNA
  misc_feature 20..21: note = DNA
agtctacaaaccagttgactt

SEQ ID NO: 5199 - DNA, 267 bp, synthetic construct
  source 1..267: mol_type = other DNA
ccacgttctgcttcactctccccatctcccccccctccccacccccaattttgtatttatttattttttaattattttgtgcagcgatgggggcggggggggggggcgcgcgccaggcggggcggggcggggcgaggggcggggcggggcgaggcggagaggtgcggcggcagccaatcagagcggcgcgctccgaaagtttccttttatggcgaggcggcggcggcggcggccctataaaaagcgaagcgcgcggcgggcgggagc

SEQ ID NO: 5200 - DNA, 130 bp, synthetic construct
  source 1..130: mol_type = other DNA
aggaacccctagtgatggagttggccactccctctctgcgcgctcgctcgctcactgaggccgggcgaccaaaggtcgcccgacgcccgggctttgcccgggcggcctcagtgagcgagcgagcgcgcag

SEQ ID NO: 5201 - DNA, 21 bp, synthetic construct
  source 1..21: mol_type = other DNA
  misc_feature 1..19: note = RNA
  misc_feature 20..21: note = DNA
gctcctcgcagttcggttctt

SEQ ID NO: 5202 - DNA, 21 bp, synthetic construct
  source 1..21: mol_type = other DNA
  misc_feature 1..19: note = RNA
  misc_feature 20..21: note = DNA
gctcctcgcagttcggttgtt

SEQ ID NO: 5203 - DNA, 21 bp, synthetic construct
  source 1..21: mol_type = other DNA
  misc_feature 1..19: note = RNA
  misc_feature 20..21: note = DNA
gctcctcgcagttcggttttt

SEQ ID NO: 5204 - DNA, 21 bp, synthetic construct
  source 1..21: mol_type = other DNA
  misc_feature 1..19: note = RNA
  misc_feature 20..21: note = DNA
gctcctcgctgttcggttctt

SEQ ID NO: 5205 - DNA, 21 bp, synthetic construct
  source 1..21: mol_type = other DNA
  misc_feature 1..19: note = RNA
  misc_feature 20..21: note = DNA
cttccgcgagaacgccaactt

SEQ ID NO: 5206 - DNA, 21 bp, synthetic construct
  source 1..21: mol_type = other DNA
  misc_feature 1..19: note = RNA
  misc_feature 20..21: note = DNA
cttccgcgagaacgccaaatt

SEQ ID NO: 5207 - DNA, 21 bp, synthetic construct
  source 1..21: mol_type = other DNA
  misc_feature 1..19: note = RNA
  misc_feature 20..21: note = DNA
cttccgcgagaacgccaattt

SEQ ID NO: 5208 - DNA, 21 bp, synthetic construct
  source 1..21: mol_type = other DNA
  misc_feature 1..19: note = RNA
  misc_feature 20..21: note = DNA
cttccgcgacaacgccaactt

SEQ ID NO: 5209 - DNA, 21 bp, synthetic construct
  source 1..21: mol_type = other DNA
  misc_feature 1..19: note = RNA
  misc_feature 20..21: note = DNA
cttccgcgagaacgccaagtt

SEQ ID NO: 5210 - DNA, 21 bp, synthetic construct
  source 1..21: mol_type = other DNA
  misc_feature 1..19: note = RNA
  misc_feature 20..21: note = DNA
aaatcagtgatgggagtactt

SEQ ID NO: 5211 - DNA, 21 bp, synthetic construct
  source 1..21: mol_type = other DNA
  misc_feature 1..19: note = RNA
  misc_feature 20..21: note = DNA
gtcgccgtcttccgccaactt

SEQ ID NO: 5212 - DNA, 21 bp, synthetic construct
  source 1..21: mol_type = other DNA
  misc_feature 1..19: note = RNA
  misc_feature 20..21: note = DNA
atggtaaaacgaagatcgctt

SEQ ID NO: 5213 - DNA, 21 bp, synthetic construct
  source 1..21: mol_type = other DNA
  misc_feature 1..19: note = RNA
  misc_feature 20..21: note = DNA
acgaagatcgccacaccgctt

SEQ ID NO: 5214 - DNA, 21 bp, synthetic construct
  source 1..21: mol_type = other DNA
  misc_feature 1..19: note = RNA
  misc_feature 20..21: note = DNA
cgcagttcggttaattggctt

SEQ ID NO: 5215 - DNA, 21 bp, synthetic construct
  source 1..21: mol_type = other DNA
  misc_feature 1..19: note = RNA
  misc_feature 20..21: note = DNA
gtactccacccaagtcgcctt

SEQ ID NO: 5216 - DNA, 21 bp, synthetic construct
  source 1..21: mol_type = other DNA
  misc_feature 1..19: note = RNA
  misc_feature 20..21: note = DNA
ctcggctttggctcgggactt

SEQ ID NO: 5217 - DNA, 21 bp, synthetic construct
  source 1..21: mol_type = other DNA
  misc_feature 1..19: note = RNA
  misc_feature 20..21: note = DNA
gcccctggggcggtcaatctt

SEQ ID NO: 5218 - DNA, 21 bp, synthetic construct
  source 1..21: mol_type = other DNA
  misc_feature 1..19: note = RNA
  misc_feature 20..21: note = DNA
ctcgcagttcggttaattctt

SEQ ID NO: 5219 - DNA, 21 bp, synthetic construct
  source 1..21: mol_type = other DNA
  misc_feature 1..19: note = RNA
  misc_feature 20..21: note = DNA
tcgccgtcttccgccaagctt

SEQ ID NO: 5220 - DNA, 21 bp, synthetic construct
  source 1..21: mol_type = other DNA
  misc_feature 1..19: note = RNA
  misc_feature 20..21: note = DNA
gacgggactggaagcgatctt

SEQ ID NO: 5221 - DNA, 21 bp, synthetic construct
  source 1..21: mol_type = other DNA
  misc_feature 1..19: note = RNA
  misc_feature 20..21: note = DNA
tggtaaaacgaagatcgcctt

SEQ ID NO: 5222 - DNA, 21 bp, synthetic construct
  source 1..21: mol_type = other DNA
  misc_feature 1..19: note = RNA
  misc_feature 20..21: note = DNA
gtaaaacgaagatcgccactt

SEQ ID NO: 5223 - DNA, 21 bp, synthetic construct
  source 1..21: mol_type = other DNA
  misc_feature 1..19: note = RNA
  misc_feature 20..21: note = DNA
acaatatcacccacgtccctt

SEQ ID NO: 5224 - DNA, 21 bp, synthetic construct
  source 1..21: mol_type = other DNA
  misc_feature 1..19: note = RNA
  misc_feature 20..21: note = DNA
ccttccgcgagaacgccactt

SEQ ID NO: 5225 - DNA, 21 bp, synthetic construct
  source 1..21: mol_type = other DNA
  misc_feature 1..19: note = RNA
  misc_feature 20..21: note = DNA
gggggctgatggtaaaacctt

SEQ ID NO: 5226 - DNA, 21 bp, synthetic construct
  source 1..21: mol_type = other DNA
  misc_feature 1..19: note = RNA
  misc_feature 20..21: note = DNA
gccgtcttccgccaagagctt

SEQ ID NO: 5227 - DNA, 21 bp, synthetic construct
  source 1..21: mol_type = other DNA
  misc_feature 1..19: note = RNA
  misc_feature 20..21: note = DNA
caccggcagcatcgacatctt

SEQ ID NO: 5228 - DNA, 21 bp, synthetic construct
  source 1..21: mol_type = other DNA
  misc_feature 1..19: note = RNA
  misc_feature 20..21: note = DNA
gtaaaagcaaagacgggactt

SEQ ID NO: 5229 - DNA, 21 bp, synthetic construct
  source 1..21: mol_type = other DNA
  misc_feature 1..19: note = RNA
  misc_feature 20..21: note = DNA
aggtttctaacccaccctctt

SEQ ID NO: 5230 - DNA, 21 bp, synthetic construct
  source 1..21: mol_type = other DNA
  misc_feature 1..19: note = RNA
  misc_feature 20..21: note = DNA
ttccgcgagaacgccaaactt

SEQ ID NO: 5231 - DNA, 21 bp, synthetic construct
  source 1..21: mol_type = other DNA
  misc_feature 1..19: note = RNA
  misc_feature 20..21: note = DNA
gaccttccgcgagaacgcctt

SEQ ID NO: 5232 - DNA, 21 bp, synthetic construct
  source 1..21: mol_type = other DNA
  misc_feature 1..19: note = RNA
  misc_feature 20..21: note = DNA
cgccacgctagctgacgactt

SEQ ID NO: 5233 - DNA, 21 bp, synthetic construct
  source 1..21: mol_type = other DNA
  misc_feature 1..19: note = RNA
  misc_feature 20..21: note = DNA
acctgcgtgtcccatctactt

SEQ ID NO: 5234 - DNA, 21 bp, synthetic construct
  source 1..21: mol_type = other DNA
  misc_feature 1..19: note = RNA
  misc_feature 20..21: note = DNA
ccccagctcgccacgctactt

SEQ ID NO: 5235 - DNA, 21 bp, synthetic construct
  source 1..21: mol_type = other DNA
  misc_feature 1..19: note = RNA
  misc_feature 20..21: note = DNA
gccgttcagctgtgacgactt

SEQ ID NO: 5236 - DNA, 21 bp, synthetic construct
  source 1..21: mol_type = other DNA
  misc_feature 1..19: note = RNA
  misc_feature 20..21: note = DNA
gctgatggtaaaacgaagctt

SEQ ID NO: 5237 - DNA, 21 bp, synthetic construct
  source 1..21: mol_type = other DNA
  misc_feature 1..19: note = RNA
  misc_feature 20..21: note = DNA
acgaggtgtctctcacccctt

SEQ ID NO: 5238 - DNA, 21 bp, synthetic construct
  source 1..21: mol_type = other DNA
  misc_feature 1..19: note = RNA
  misc_feature 20..21: note = DNA
gggccagcctaagatcatctt

SEQ ID NO: 5239 - DNA, 21 bp, synthetic construct
  source 1..21: mol_type = other DNA
  misc_feature 1..19: note = RNA
  misc_feature 20..21: note = DNA
tctaacccaccctcacgactt

SEQ ID NO: 5240 - DNA, 21 bp, synthetic construct
  source 1..21: mol_type = other DNA
  misc_feature 1..19: note = RNA
  misc_feature 20..21: note = DNA
taaagaggtttctaacccctt

SEQ ID NO: 5241 - DNA, 21 bp, synthetic construct
  source 1..21: mol_type = other DNA
  misc_feature 1..19: note = RNA
  misc_feature 20..21: note = DNA
ctcacctcctaatagactctt

SEQ ID NO: 5242 - DNA, 21 bp, synthetic construct
  source 1..21: mol_type = other DNA
  misc_feature 1..19: note = RNA
  misc_feature 20..21: note = DNA
ggatatactgtatgccggctt

SEQ ID NO: 5243 - DNA, 21 bp, synthetic construct
  source 1..21: mol_type = other DNA
  misc_feature 1..19: note = RNA
  misc_feature 20..21: note = DNA
caccctcacgaggtgtctctt

SEQ ID NO: 5244 - DNA, 21 bp, synthetic construct
  source 1..21: mol_type = other DNA
  misc_feature 1..19: note = RNA
  misc_feature 20..21: note = DNA
cacgctagctgacgaggtctt

SEQ ID NO: 5245 - DNA, 21 bp, synthetic construct
  source 1..21: mol_type = other DNA
  misc_feature 1..19: note = RNA
  misc_feature 20..21: note = DNA
tcccatgatttcttcggtctt

SEQ ID NO: 5246 - protein, 17 aa, synthetic construct
TINGSGSPHKYGQNQQT

SEQ ID NO: 5247 - DNA, 21 bp, synthetic construct
  source 1..21: mol_type = other DNA
  misc_feature 1..19: note = RNA
  misc_feature 20..21: note = DNA
ttgagttgtagttggattctt

SEQ ID NO: 5248 - DNA, 21 bp, synthetic construct
  source 1..21: mol_type = other DNA
  misc_feature 1..19: note = RNA
  misc_feature 20..21: note = DNA
ctgcgtgtcccatctacactt

SEQ ID NO: 5249 - DNA, 21 bp, synthetic construct
  source 1..21: mol_type = other DNA
  misc_feature 1..19: note = RNA
  misc_feature 20..21: note = DNA
gttgagttgtagttggatctt

SEQ ID NO: 5250 - DNA, 21 bp, synthetic construct
  source 1..21: mol_type = other DNA
  misc_feature 1..19: note = RNA
  misc_feature 20..21: note = DNA
ggtggtggttagagatatctt

SEQ ID NO: 5251 - DNA, 21 bp, synthetic construct
  source 1..21: mol_type = other DNA
  misc_feature 1..19: note = RNA
  misc_feature 20..21: note = DNA
gggctagataggatatacctt

SEQ ID NO: 5252 - DNA, 21 bp, synthetic construct
  source 1..21: mol_type = other DNA
  misc_feature 1..19: note = RNA
  misc_feature 20..21: note = DNA
aggattccagcaaaaaccctt

SEQ ID NO: 5253 - DNA, 21 bp, synthetic construct
  source 1..21: mol_type = other DNA
  misc_feature 1..19: note = RNA
  misc_feature 20..21: note = DNA
ggcccctggggcggtcaactt

SEQ ID NO: 5254 - DNA, 21 bp, synthetic construct
  source 1..21: mol_type = other DNA
  misc_feature 1..19: note = RNA
  misc_feature 20..21: note = DNA
gattaggactgaagcgatctt

SEQ ID NO: 5255 - DNA, 21 bp, synthetic construct
  source 1..21: mol_type = other DNA
  misc_feature 1..19: note = RNA
  misc_feature 20..21: note = DNA
ctcccaagttttgaaaggctt

SEQ ID NO: 5256 - DNA, 21 bp, synthetic construct
  source 1..21: mol_type = other DNA
  misc_feature 1..19: note = RNA
  misc_feature 20..21: note = DNA
gctggtctggcttgcggcctt

SEQ ID NO: 5257 - DNA, 21 bp, synthetic construct
  source 1..21: mol_type = other DNA
  misc_feature 1..19: note = RNA
  misc_feature 20..21: note = DNA
gttccactcatccaactgctt

SEQ ID NO: 5258 - DNA, 21 bp, synthetic construct
  source 1..21: mol_type = other DNA
  misc_feature 1..19: note = RNA
  misc_feature 20..21: note = DNA
cacctcctaatagacttactt

SEQ ID NO: 5259 - DNA, 21 bp, synthetic construct
  source 1..21: mol_type = other DNA
  misc_feature 1..19: note = RNA
  misc_feature 20..21: note = DNA
ttctaacccaccctcacgctt

SEQ ID NO: 5260 - DNA, 21 bp, synthetic construct
  source 1..21: mol_type = other DNA
  misc_feature 1..19: note = RNA
  misc_feature 20..21: note = DNA
aagcccacaatcatgcctctt

SEQ ID NO: 5261 - DNA, 21 bp, synthetic construct
  source 1..21: mol_type = other DNA
  misc_feature 1..19: note = RNA
  misc_feature 20..21: note = DNA
accttccgcgagaacgccctt

SEQ ID NO: 5262 - DNA, 21 bp, synthetic construct
  source 1..21: mol_type = other DNA
  misc_feature 1..19: note = RNA
  misc_feature 20..21: note = DNA
gctggtcacgtgacccaactt

SEQ ID NO: 5263 - DNA, 21 bp, synthetic construct
  source 1..21: mol_type = other DNA
  misc_feature 1..19: note = RNA
  misc_feature 20..21: note = DNA
taacccaccctcacgaggctt

SEQ ID NO: 5264 - DNA, 21 bp, synthetic construct
  source 1..21: mol_type = other DNA
  misc_feature 1..19: note = RNA
  misc_feature 20..21: note = DNA
cttacaactcctgcatcactt

SEQ ID NO: 5265 - DNA, 21 bp, synthetic construct
  source 1..21: mol_type = other DNA
  misc_feature 1..19: note = RNA
  misc_feature 20..21: note = DNA
tgggactttagggctaacctt

SEQ ID NO: 5266 - DNA, 21 bp, synthetic construct
  source 1..21: mol_type = other DNA
  misc_feature 1..19: note = RNA
  misc_feature 20..21: note = DNA
gccacaggcagacgatgtctt

SEQ ID NO: 5267 - DNA, 21 bp, synthetic construct
  source 1..21: mol_type = other DNA
  misc_feature 1..19: note = RNA
  misc_feature 20..21: note = DNA
gcctcttgggagacgtccctt

SEQ ID NO: 5268 - DNA, 21 bp, synthetic construct
  source 1..21: mol_type = other DNA
  misc_feature 1..19: note = RNA
  misc_feature 20..21: note = DNA
gagatatgcccccctcatctt

SEQ ID NO: 5269 - DNA, 21 bp, synthetic construct
  source 1..21: mol_type = other DNA
  misc_feature 1..19: note = RNA
  misc_feature 20..21: note = DNA
tcccaagttttgaaaggcctt

SEQ ID NO: 5270 - DNA, 21 bp, synthetic construct
  source 1..21: mol_type = other DNA
  misc_feature 1..19: note = RNA
  misc_feature 20..21: note = DNA
agttattactctgattaactt

SEQ ID NO: 5271 - DNA, 21 bp, synthetic construct
  source 1..21: mol_type = other DNA
  misc_feature 1..19: note = RNA
  misc_feature 20..21: note = DNA
tatgcccccctcattactctt

SEQ ID NO: 5272 - DNA, 21 bp, synthetic construct
  source 1..21: mol_type = other DNA
  misc_feature 1..19: note = RNA
  misc_feature 20..21: note = DNA
caaaatcaggggatcgcactt

SEQ ID NO: 5273 - DNA, 21 bp, synthetic construct
  source 1..21: mol_type = other DNA
  misc_feature 1..19: note = RNA
  misc_feature 20..21: note = DNA
cagaccacggggcggagactt

SEQ ID NO: 5274 - DNA, 21 bp, synthetic construct
  source 1..21: mol_type = other DNA
  misc_feature 1..19: note = RNA
  misc_feature 20..21: note = DNA
cttgggtgggctagatagctt

SEQ ID NO: 5275 - DNA, 21 bp, synthetic construct
  source 1..21: mol_type = other DNA
  misc_feature 1..19: note = RNA
  misc_feature 20..21: note = DNA
ctcgccacgctagctgacctt

SEQ ID NO: 5276 - DNA, 21 bp, synthetic construct
  source 1..21: mol_type = other DNA
  misc_feature 1..19: note = RNA
  misc_feature 20..21: note = DNA
tgttgagttgtagttggactt

SEQ ID NO: 5277 - DNA, 21 bp, synthetic construct
  source 1..21: mol_type = other DNA
  misc_feature 1..19: note = RNA
  misc_feature 20..21: note = DNA
tatacatagatgttgcccctt

SEQ ID NO: 5278 - DNA, 21 bp, synthetic construct
  source 1..21: mol_type = other DNA
  misc_feature 1..19: note = RNA
  misc_feature 20..21: note = DNA
aacccaccctcacgaggtctt

SEQ ID NO: 5279 - DNA, 21 bp, synthetic construct
  source 1..21: mol_type = other DNA
  misc_feature 1..19: note = RNA
  misc_feature 20..21: note = DNA
gttgagcaggactatttcctt

SEQ ID NO: 5280 - DNA, 21 bp, synthetic construct
  source 1..21: mol_type = other DNA
  misc_feature 1..19: note = RNA
  misc_feature 20..21: note = DNA
ccacgctagctgacgaggctt

SEQ ID NO: 5281 - DNA, 21 bp, synthetic construct
  source 1..21: mol_type = other DNA
  misc_feature 1..19: note = RNA
  misc_feature 20..21: note = DNA
ctcctaatagacttagccctt

SEQ ID NO: 5282 - DNA, 21 bp, synthetic construct
  source 1..21: mol_type = other DNA
  misc_feature 1..19: note = RNA
  misc_feature 20..21: note = DNA
gatttcttcggtaattctctt

SEQ ID NO: 5283 - DNA, 21 bp, synthetic construct
  source 1..21: mol_type = other DNA
  misc_feature 1..19: note = RNA
  misc_feature 20..21: note = DNA
gtcccaaaggaggcttacctt

SEQ ID NO: 5284 - DNA, 21 bp, synthetic construct
  source 1..21: mol_type = other DNA
  misc_feature 1..19: note = RNA
  misc_feature 20..21: note = DNA
ggtggttagagatatgccctt

SEQ ID NO: 5285 - DNA, 21 bp, synthetic construct
  source 1..21: mol_type = other DNA
  misc_feature 1..19: note = RNA
  misc_feature 20..21: note = DNA
ggctagataggatatactctt

SEQ ID NO: 5286 - DNA, 21 bp, synthetic construct
  source 1..21: mol_type = other DNA
  misc_feature 1..19: note = RNA
  misc_feature 20..21: note = DNA
attcaccagagtgactatctt

SEQ ID NO: 5287 - DNA, 21 bp, synthetic construct
  source 1..21: mol_type = other DNA
  misc_feature 1..19: note = RNA
  misc_feature 20..21: note = DNA
gatatactgtatgccggcctt

SEQ ID NO: 5288 - DNA, 21 bp, synthetic construct
  source 1..21: mol_type = other DNA
  misc_feature 1..19: note = RNA
  misc_feature 20..21: note = DNA
gaccacagcagggattggctt

SEQ ID NO: 5289 - DNA, 21 bp, synthetic construct
  source 1..21: mol_type = other DNA
  misc_feature 1..19: note = RNA
  misc_feature 20..21: note = DNA
gagccacaggcagacgatctt

SEQ ID NO: 5290 - DNA, 21 bp, synthetic construct
  source 1..21: mol_type = other DNA
  misc_feature 1..19: note = RNA
  misc_feature 20..21: note = DNA
ctagctgacgaggtgtctctt

SEQ ID NO: 5291 - DNA, 21 bp, synthetic construct
  source 1..21: mol_type = other DNA
  misc_feature 1..19: note = RNA
  misc_feature 20..21: note = DNA
aagggggctgatggtaaactt

SEQ ID NO: 5292 - DNA, 21 bp, synthetic construct
  source 1..21: mol_type = other DNA
  misc_feature 1..19: note = RNA
  misc_feature 20..21: note = DNA
atcaggggatcgcagcggctt

SEQ ID NO: 5293 - DNA, 21 bp, synthetic construct
  source 1..21: mol_type = other DNA
  misc_feature 1..19: note = RNA
  misc_feature 20..21: note = DNA
cccagctcgccacgctagctt

SEQ ID NO: 5294 - DNA, 21 bp, synthetic construct
  source 1..21: mol_type = other DNA
  misc_feature 1..19: note = RNA
  misc_feature 20..21: note = DNA
cgttcagctgtgacgaagctt

SEQ ID NO: 5295 - DNA, 21 bp, synthetic construct
  source 1..21: mol_type = other DNA
  misc_feature 1..19: note = RNA
  misc_feature 20..21: note = DNA
cacttgcaagtcccatgactt

SEQ ID NO: 5296 - DNA, 21 bp, synthetic construct
  source 1..21: mol_type = other DNA
  misc_feature 1..19: note = RNA
  misc_feature 20..21: note = DNA
tgggctagataggatatactt

SEQ ID NO: 5297 - DNA, 21 bp, synthetic construct
  source 1..21: mol_type = other DNA
  misc_feature 1..19: note = RNA
  misc_feature 20..21: note = DNA
tttatgcttggattcaccctt

SEQ ID NO: 5298 - DNA, 21 bp, synthetic construct
  source 1..21: mol_type = other DNA
  misc_feature 1..19: note = RNA
  misc_feature 20..21: note = DNA
ccaaaatcaggggatcgcctt

SEQ ID NO: 5299 - DNA, 21 bp, synthetic construct
  source 1..21: mol_type = other DNA
  misc_feature 1..19: note = RNA
  misc_feature 20..21: note = DNA
ccgttcagctgtgacgaactt

SEQ ID NO: 5300 - DNA, 21 bp, synthetic construct
  source 1..21: mol_type = other DNA
  misc_feature 1..19: note = RNA
  misc_feature 20..21: note = DNA
ggccacatccaacatttcctt

SEQ ID NO: 5301 - DNA, 21 bp, synthetic construct
  source 1..21: mol_type = other DNA
  misc_feature 1..19: note = RNA
  misc_feature 20..21: note = DNA
tttatcaatagttccattctt

SEQ ID NO: 5302 - DNA, 21 bp, synthetic construct
  source 1..21: mol_type = other DNA
  misc_feature 1..19: note = RNA
  misc_feature 20..21: note = DNA
ggcggagatcgtgtacaactt

SEQ ID NO: 5303 - DNA, 21 bp, synthetic construct
  source 1..21: mol_type = other DNA
  misc_feature 1..19: note = RNA
  misc_feature 20..21: note = DNA
tcgccacgctagctgacgctt

SEQ ID NO: 5304 - DNA, 21 bp, synthetic construct
  source 1..21: mol_type = other DNA
  misc_feature 1..19: note = RNA
  misc_feature 20..21: note = DNA
gtctggcttgcggcgcgactt

SEQ ID NO: 5305 - DNA, 21 bp, synthetic construct
  source 1..21: mol_type = other DNA
  misc_feature 1..19: note = RNA
  misc_feature 20..21: note = DNA
acctcctaatagacttagctt

SEQ ID NO: 5306 - DNA, 21 bp, synthetic construct
  source 1..21: mol_type = other DNA
  misc_feature 1..19: note = RNA
  misc_feature 20..21: note = DNA
tgtcccatctacagacctctt

SEQ ID NO: 5307 - DNA, 21 bp, synthetic construct
  source 1..21: mol_type = other DNA
  misc_feature 1..19: note = RNA
  misc_feature 20..21: note = DNA
cggtaattctgagggtggctt

SEQ ID NO: 5308 - DNA, 21 bp, synthetic construct
  source 1..21: mol_type = other DNA
  misc_feature 1..19: note = RNA
  misc_feature 20..21: note = DNA
tttcttcggtaattctgactt

SEQ ID NO: 5309 - DNA, 21 bp, synthetic construct
  source 1..21: mol_type = other DNA
  misc_feature 1..19: note = RNA
  misc_feature 20..21: note = DNA
gcaccctgttgagttgtactt

SEQ ID NO: 5310 - DNA, 21 bp, synthetic construct
  source 1..21: mol_type = other DNA
  misc_feature 1..19: note = RNA
  misc_feature 20..21: note = DNA
atatactgtatgccggctctt

SEQ ID NO: 5311 - DNA, 21 bp, synthetic construct
  source 1..21: mol_type = other DNA
  misc_feature 1..19: note = RNA
  misc_feature 20..21: note = DNA
acttctggtttgggtacactt

SEQ ID NO: 5312 - DNA, 21 bp, synthetic construct
  source 1..21: mol_type = other DNA
  misc_feature 1..19: note = RNA
  misc_feature 20..21: note = DNA
gaagcacaggattaggacctt

SEQ ID NO: 5313 - DNA, 21 bp, synthetic construct
  source 1..21: mol_type = other DNA
  misc_feature 1..19: note = RNA
  misc_feature 20..21: note = DNA
ctttcaggggtcctaagcctt

SEQ ID NO: 5314 - DNA, 21 bp, synthetic construct
  source 1..21: mol_type = other DNA
  misc_feature 1..19: note = RNA
  misc_feature 20..21: note = DNA
gatatgcccccctcattactt

SEQ ID NO: 5315 - DNA, 21 bp, synthetic construct
  source 1..21: mol_type = other DNA
  misc_feature 1..19: note = RNA
  misc_feature 20..21: note = DNA
ctaaggaggccgttcagcctt

SEQ ID NO: 5316 - DNA, 21 bp, synthetic construct
  source 1..21: mol_type = other DNA
  misc_feature 1..19: note = RNA
  misc_feature 20..21: note = DNA
ggaacacacccccttggactt

SEQ ID NO: 5317 - DNA, 21 bp, synthetic construct
  source 1..21: mol_type = other DNA
  misc_feature 1..19: note = RNA
  misc_feature 20..21: note = DNA
cctaagcccacaatcatgctt

SEQ ID NO: 5318 - DNA, 21 bp, synthetic construct
  source 1..21: mol_type = other DNA
  misc_feature 1..19: note = RNA
  misc_feature 20..21: note = DNA
ctggggcctcccaagtttctt

SEQ ID NO: 5319 - DNA, 21 bp, synthetic construct
  source 1..21: mol_type = other DNA
  misc_feature 1..19: note = RNA
  misc_feature 20..21: note = DNA
tgtcccccacttgcacccctt

SEQ ID NO: 5320 - DNA, 21 bp, synthetic construct
  source 1..21: mol_type = other DNA
  misc_feature 1..19: note = RNA
  misc_feature 20..21: note = DNA
aagttattactctgattactt

SEQ ID NO: 5321 - DNA, 21 bp, synthetic construct
  source 1..21: mol_type = other DNA
  misc_feature 1..19: note = RNA
  misc_feature 20..21: note = DNA
aatagacttagccccatgctt

SEQ ID NO: 5322 - DNA, 21 bp, synthetic construct
  source 1..21: mol_type = other DNA
  misc_feature 1..19: note = RNA
  misc_feature 20..21: note = DNA
cagtaatgaccctggttgctt

SEQ ID NO: 5323 - DNA, 21 bp, synthetic construct
  source 1..21: mol_type = other DNA
  misc_feature 1..19: note = RNA
  misc_feature 20..21: note = DNA
ggaggaatgtgtaagatactt

SEQ ID NO: 5324 - DNA, 21 bp, synthetic construct
  source 1..21: mol_type = other DNA
  misc_feature 1..19: note = RNA
  misc_feature 20..21: note = DNA
caatcatgcctccctaagctt

SEQ ID NO: 5325 - DNA, 21 bp, synthetic construct
  source 1..21: mol_type = other DNA
  misc_feature 1..19: note = RNA
  misc_feature 20..21: note = DNA
tccactcatccaactgggctt

SEQ ID NO: 5326 - DNA, 21 bp, synthetic construct
  source 1..21: mol_type = other DNA
  misc_feature 1..19: note = RNA
  misc_feature 20..21: note = DNA
aggtgcaggcgtaggaatctt

SEQ ID NO: 5327 - DNA, 21 bp, synthetic construct
  source 1..21: mol_type = other DNA
  misc_feature 1..19: note = RNA
  misc_feature 20..21: note = DNA
gataggatatactgtatgctt

SEQ ID NO: 5328 - DNA, 21 bp, synthetic construct
  source 1..21: mol_type = other DNA
  misc_feature 1..19: note = RNA
  misc_feature 20..21: note = DNA
tcctaagcccacaatcatctt

SEQ ID NO: 5329 - DNA, 21 bp, synthetic construct
  source 1..21: mol_type = other DNA
  misc_feature 1..19: note = RNA
  misc_feature 20..21: note = DNA
ggccgttcagctgtgacgctt

SEQ ID NO: 5330 - DNA, 21 bp, synthetic construct
  source 1..21: mol_type = other DNA
  misc_feature 1..19: note = RNA
  misc_feature 20..21: note = DNA
tggccacatccaacatttctt

SEQ ID NO: 5331 - DNA, 21 bp, synthetic construct
  source 1..21: mol_type = other DNA
  misc_feature 1..19: note = RNA
  misc_feature 20..21: note = DNA
agcaggactatttctggcctt

SEQ ID NO: 5332 - DNA, 21 bp, synthetic construct
  source 1..21: mol_type = other DNA
  misc_feature 1..19: note = RNA
  misc_feature 20..21: note = DNA
atatggacatctggttgcctt

SEQ ID NO: 5333 - DNA, 21 bp, synthetic construct
  source 1..21: mol_type = other DNA
  misc_feature 1..19: note = RNA
  misc_feature 20..21: note = DNA
acttgcaccctagcttgtctt

SEQ ID NO: 5334 - DNA, 21 bp, synthetic construct
  source 1..21: mol_type = other DNA
  misc_feature 1..19: note = RNA
  misc_feature 20..21: note = DNA
gtaaagaggtttctaaccctt

SEQ ID NO: 5335 - DNA, 21 bp, synthetic construct
  source 1..21: mol_type = other DNA
  misc_feature 1..19: note = RNA
  misc_feature 20..21: note = DNA
gactcactttatcaatagctt

SEQ ID NO: 5336 - DNA, 21 bp, synthetic construct
  source 1..21: mol_type = other DNA
  misc_feature 1..19: note = RNA
  misc_feature 20..21: note = DNA
agctgctgactcactttactt

SEQ ID NO: 5337 - DNA, 21 bp, synthetic construct
  source 1..21: mol_type = other DNA
  misc_feature 1..19: note = RNA
  misc_feature 20..21: note = DNA
aagggttaccctgggcacctt

SEQ ID NO: 5338 - DNA, 21 bp, synthetic construct
  source 1..21: mol_type = other DNA
  misc_feature 1..19: note = RNA
  misc_feature 20..21: note = DNA
tgtaaagaggtttctaacctt

SEQ ID NO: 5339 - DNA, 21 bp, synthetic construct
  source 1..21: mol_type = other DNA
  misc_feature 1..19: note = RNA
  misc_feature 20..21: note = DNA
tggcttgcggcgcgaggactt

SEQ ID NO: 5340 - DNA, 21 bp, synthetic construct
  source 1..21: mol_type = other DNA
  misc_feature 1..19: note = RNA
  misc_feature 20..21: note = DNA
gccacgctagctgacgagctt

SEQ ID NO: 5341 - DNA, 21 bp, synthetic construct
  source 1..21: mol_type = other DNA
  misc_feature 1..19: note = RNA
  misc_feature 20..21: note = DNA
cccaaaggaggcttacaactt

SEQ ID NO: 5342 - DNA, 21 bp, synthetic construct
  source 1..21: mol_type = other DNA
  misc_feature 1..19: note = RNA
  misc_feature 20..21: note = DNA
tgttgtgctatggggggactt

SEQ ID NO: 5343 - DNA, 21 bp, synthetic construct
  source 1..21: mol_type = other DNA
  misc_feature 1..19: note = RNA
  misc_feature 20..21: note = DNA
gggaacacacccccttggctt

SEQ ID NO: 5344 - DNA, 21 bp, synthetic construct
  source 1..21: mol_type = other DNA
  misc_feature 1..19: note = RNA
  misc_feature 20..21: note = DNA
ttccaaattgatgggtggctt

SEQ ID NO: 5345 - DNA, 21 bp, synthetic construct
  source 1..21: mol_type = other DNA
  misc_feature 1..19: note = RNA
  misc_feature 20..21: note = DNA
accggcagcatcgacatgctt

SEQ ID NO: 5346 - DNA, 21 bp, synthetic construct
  source 1..21: mol_type = other DNA
  misc_feature 1..19: note = RNA
  misc_feature 20..21: note = DNA
ctggcttgcggcgcgaggctt

SEQ ID NO: 5347 - DNA, 21 bp, synthetic construct
  source 1..21: mol_type = other DNA
  misc_feature 1..19: note = RNA
  misc_feature 20..21: note = DNA
gtgtaagatagttaacatctt

SEQ ID NO: 5348 - DNA, 21 bp, synthetic construct
  source 1..21: mol_type = other DNA
  misc_feature 1..19: note = RNA
  misc_feature 20..21: note = DNA
aggattaggactgaagcgctt

SEQ ID NO: 5349 - DNA, 21 bp, synthetic construct
  source 1..21: mol_type = other DNA
  misc_feature 1..19: note = RNA
  misc_feature 20..21: note = DNA
aatgtgtaagatagttaactt

SEQ ID NO: 5350 - DNA, 21 bp, synthetic construct
  source 1..21: mol_type = other DNA
  misc_feature 1..19: note = RNA
  misc_feature 20..21: note = DNA
ggccagcctaagatcatgctt

SEQ ID NO: 5351 - DNA, 21 bp, synthetic construct
  source 1..21: mol_type = other DNA
  misc_feature 1..19: note = RNA
  misc_feature 20..21: note = DNA
agttccatttaaattgacctt

SEQ ID NO: 5352 - DNA, 21 bp, synthetic construct
  source 1..21: mol_type = other DNA
  misc_feature 1..19: note = RNA
  misc_feature 20..21: note = DNA
tccatttaaattgacttcctt

SEQ ID NO: 5353 - DNA, 21 bp, synthetic construct
  source 1..21: mol_type = other DNA
  misc_feature 1..19: note = RNA
  misc_feature 20..21: note = DNA
cccaccctcacgaggtgtctt

SEQ ID NO: 5354 - DNA, 21 bp, synthetic construct
  source 1..21: mol_type = other DNA
  misc_feature 1..19: note = RNA
  misc_feature 20..21: note = DNA
catcttagcttagctttcctt

SEQ ID NO: 5355 - DNA, 21 bp, synthetic construct
  source 1..21: mol_type = other DNA
  misc_feature 1..19: note = RNA
  misc_feature 20..21: note = DNA
acttagccccatgagtttctt

SEQ ID NO: 5356 - DNA, 21 bp, synthetic construct
  source 1..21: mol_type = other DNA
  misc_feature 1..19: note = RNA
  misc_feature 20..21: note = DNA
tcatggtttagggtgatcctt

SEQ ID NO: 5357 - DNA, 21 bp, synthetic construct
  source 1..21: mol_type = other DNA
  misc_feature 1..19: note = RNA
  misc_feature 20..21: note = DNA
gcctgaagcacaggattactt

SEQ ID NO: 5358 - DNA, 21 bp, synthetic construct
  source 1..21: mol_type = other DNA
  misc_feature 1..19: note = RNA
  misc_feature 20..21: note = DNA
catactgagggtgaaattctt

SEQ ID NO: 5359 - DNA, 21 bp, synthetic construct
  source 1..21: mol_type = other DNA
  misc_feature 1..19: note = RNA
  misc_feature 20..21: note = DNA
aagatcatggtttagggtctt

SEQ ID NO: 5360 - DNA, 21 bp, synthetic construct
  source 1..21: mol_type = other DNA
  misc_feature 1..19: note = RNA
  misc_feature 20..21: note = DNA
gggatctcccccttgtggctt

SEQ ID NO: 5361 - DNA, 21 bp, synthetic construct
  source 1..21: mol_type = other DNA
  misc_feature 1..19: note = RNA
  misc_feature 20..21: note = DNA
gaggaatgtgtaagatagctt

SEQ ID NO: 5362 - DNA, 21 bp, synthetic construct
  source 1..21: mol_type = other DNA
  misc_feature 1..19: note = RNA
  misc_feature 20..21: note = DNA
atcatggtttagggtgatctt

SEQ ID NO: 5363 - DNA, 21 bp, synthetic construct
  source 1..21: mol_type = other DNA
  misc_feature 1..19: note = RNA
  misc_feature 20..21: note = DNA
cagcatcgacatggtagactt

SEQ ID NO: 5364 - DNA, 21 bp, synthetic construct
  source 1..21: mol_type = other DNA
  misc_feature 1..19: note = RNA
  misc_feature 20..21: note = DNA
ggtgcaggcgtaggaatactt

SEQ ID NO: 5365 - DNA, 21 bp, synthetic construct
  source 1..21: mol_type = other DNA
  misc_feature 1..19: note = RNA
  misc_feature 20..21: note = DNA
aggaatgtgtaagatagtctt

SEQ ID NO: 5366 - DNA, 21 bp, synthetic construct
  source 1..21: mol_type = other DNA
  misc_feature 1..19: note = RNA
  misc_feature 20..21: note = DNA
catggtttagggtgatcactt

SEQ ID NO: 5367 - DNA, 21 bp, synthetic construct
  source 1..21: mol_type = other DNA
  misc_feature 1..19: note = RNA
  misc_feature 20..21: note = DNA
tccacccaagtcgccgtcctt

SEQ ID NO: 5368 - DNA, 21 bp, synthetic construct
  source 1..21: mol_type = other DNA
  misc_feature 1..19: note = RNA
  misc_feature 20..21: note = DNA
tcagtaatgaccctggttctt

SEQ ID NO: 5369 - DNA, 21 bp, synthetic construct
  source 1..21: mol_type = other DNA
  misc_feature 1..19: note = RNA
  misc_feature 20..21: note = DNA
ctgggactttagggctaactt

SEQ ID NO: 5370 - DNA, 21 bp, synthetic construct
  source 1..21: mol_type = other DNA
  misc_feature 1..19: note = RNA
  misc_feature 20..21: note = DNA
caggcgtaggaatatggactt

SEQ ID NO: 5371 - DNA, 21 bp, synthetic construct
  source 1..21: mol_type = other DNA
  misc_feature 1..19: note = RNA
  misc_feature 20..21: note = DNA
gcaggcgtaggaatatggctt

SEQ ID NO: 5372 - DNA, 21 bp, synthetic construct
  source 1..21: mol_type = other DNA
  misc_feature 1..19: note = RNA
  misc_feature 20..21: note = DNA
agccacgaggtcggggcgctt

SEQ ID NO: 5373 - DNA, 21 bp, synthetic construct
  source 1..21: mol_type = other DNA
  misc_feature 1..19: note = RNA
  misc_feature 20..21: note = DNA
aatcatgcctccctaagactt

SEQ ID NO: 5374 - DNA, 21 bp, synthetic construct
  source 1..21: mol_type = other DNA
  misc_feature 1..19: note = RNA
  misc_feature 20..21: note = DNA
taagccgttggcacctctctt

SEQ ID NO: 5375 - DNA, 21 bp, synthetic construct
  source 1..21: mol_type = other DNA
  misc_feature 1..19: note = RNA
  misc_feature 20..21: note = DNA
atcgacatggtagactcgctt

SEQ ID NO: 5376 - DNA, 21 bp, synthetic construct
  source 1..21: mol_type = other DNA
  misc_feature 1..19: note = RNA
  misc_feature 20..21: note = DNA
tcttcggtaattctgaggctt

SEQ ID NO: 5377 - DNA, 21 bp, synthetic construct
  source 1..21: mol_type = other DNA
  misc_feature 1..19: note = RNA
  misc_feature 20..21: note = DNA
aagtcgccagtggtgtctctt

SEQ ID NO: 5378 - DNA, 21 bp, synthetic construct
  source 1..21: mol_type = other DNA
  misc_feature 1..19: note = RNA
  misc_feature 20..21: note = DNA
ataaattgaaaaggcacgctt

SEQ ID NO: 5379 - DNA, 21 bp, synthetic construct
  source 1..21: mol_type = other DNA
  misc_feature 1..19: note = RNA
  misc_feature 20..21: note = DNA
gttagaggcccttggggtctt

SEQ ID NO: 5380 - DNA, 21 bp, synthetic construct
  source 1..21: mol_type = other DNA
  misc_feature 1..19: note = RNA
  misc_feature 20..21: note = DNA
aatcaggggatcgcagcgctt

SEQ ID NO: 5381 - DNA, 21 bp, synthetic construct
  source 1..21: mol_type = other DNA
  misc_feature 1..19: note = RNA
  misc_feature 20..21: note = DNA
taagatagttaacatgggctt

SEQ ID NO: 5382 - DNA, 21 bp, synthetic construct
  source 1..21: mol_type = other DNA
  misc_feature 1..19: note = RNA
  misc_feature 20..21: note = DNA
tgtaagatagttaacatgctt

SEQ ID NO: 5383 - DNA, 21 bp, synthetic construct
  source 1..21: mol_type = other DNA
  misc_feature 1..19: note = RNA
  misc_feature 20..21: note = DNA
cggccgcctgtccttggtctt

SEQ ID NO: 5384 - DNA, 21 bp, synthetic construct
  source 1..21: mol_type = other DNA
  misc_feature 1..19: note = RNA
  misc_feature 20..21: note = DNA
ttagaggcccttggggttctt

SEQ ID NO: 5385 - DNA, 21 bp, synthetic construct
  source 1..21: mol_type = other DNA
  misc_feature 1..19: note = RNA
  misc_feature 20..21: note = DNA
gggatcgcagcggctacactt

SEQ ID NO: 5386 - DNA, 21 bp, synthetic construct
  source 1..21: mol_type = other DNA
  misc_feature 1..19: note = RNA
  misc_feature 20..21: note = DNA
cacgaggtcggggcgaggctt

SEQ ID NO: 5387 - DNA, 50 bp, synthetic construct
  source 1..50: mol_type = other DNA
tttatgcctcatcctctgagtgctgaaggcttgctgtaggctgtatgctg

SEQ ID NO: 5388 - protein, 18 aa, synthetic construct
KTINGCSSPHWKAQNQQT

SEQ ID NO: 5389 - protein, 18 aa, synthetic construct
KTINGGGSTHSKAQNQQT

SEQ ID NO: 5390 - DNA, 54 bp, synthetic construct
  source 1..54: mol_type = other DNA
gtgctgggcggggggcggcgggccctcccgcagaacaccatgcgctcttcggga

SEQ ID NO: 5391 - DNA, 54 bp, synthetic construct
  source 1..54: mol_type = other DNA
gtgctgggcggggggcggcgggccctcccgcagaacaccatgcgctccacggaa

SEQ ID NO: 5392 - DNA, 35 bp, synthetic construct
  source 1..35: mol_type = other DNA
gggccctcccgcagaacaccatgcgctccacggaa

SEQ ID NO: 5393 - DNA, 30 bp, synthetic construct
  source 1..30: mol_type = other DNA
ctcccgcagaacaccatgcgctccacggaa

SEQ ID NO: 5394 - DNA, 55 bp, synthetic construct
  source 1..55: mol_type = other DNA
gtgctgggcggggggcggcgggccctcccgcagaacaccatgcgctccacggaag

SEQ ID NO: 5395 - DNA, 54 bp, synthetic construct
  source 1..54: mol_type = other DNA
gtgctgggcggggggcggcgggccctcccgcagaacaccatgcgctcctcggaa

SEQ ID NO: 5396 - protein, 18 aa, synthetic construct
KTINGHDSPHSKAQGQQT

SEQ ID NO: 5397 - protein, 18 aa, synthetic construct
KTINGHDSPHSKAQHQQT

SEQ ID NO: 5398 - protein, 18 aa, synthetic construct
KTINGHDSPHSKAQIQQT

SEQ ID NO: 5399 - protein, 18 aa, synthetic construct
KTINGHDSPHSKAQKQQT

SEQ ID NO: 5400 - protein, 18 aa, synthetic construct
KTINGHDSPHSKAQNLSS

SEQ ID NO: 5401 - protein, 18 aa, synthetic construct
KTINGHDSPHSKAQNPQT

SEQ ID NO: 5402 - protein, 18 aa, synthetic construct
KTINGHDSPHSKAQNQET

SEQ ID NO: 5403 - protein, 18 aa, synthetic construct
KTINGHDSPHSKAQNQHT

SEQ ID NO: 5404 - protein, 18 aa, synthetic construct
KTINGHDSPHSKAQNQLT

SEQ ID NO: 5405 - protein, 18 aa, synthetic construct
KTINGHDSPHSKAQNQPT

SEQ ID NO: 5406 - protein, 18 aa, synthetic construct
KTINGHDSPHSKAQNQQA

SEQ ID NO: 5407 - protein, 18 aa, synthetic construct
KTINGHDSPHSKAQNTGS

SEQ ID NO: 5408 - protein, 18 aa, synthetic construct
KTINGHDSPHSKAQSQQT

SEQ ID NO: 5409 - protein, 18 aa, synthetic construct
KTINGHDSPHSKAQTQQT

SEQ ID NO: 5410 - protein, 18 aa, synthetic construct
KTINGHDSPHSKAQYQQT

SEQ ID NO: 5411 - protein, 18 aa, synthetic construct
KTINGHDSPHSKARNQQT

SEQ ID NO: 5412 - protein, 18 aa, synthetic construct
KTINGHDSPHSKLPGQQT

SEQ ID NO: 5413 - protein, 18 aa, synthetic construct
KTINGHDSPHSKSPNQQT

SEQ ID NO: 5414 - protein, 18 aa, synthetic construct
KTINGHESPHKSGQNAFL

SEQ ID NO: 5415 - protein, 18 aa, synthetic construct
KTINGIGSPHSKAPNEQT

SEQ ID NO: 5416 - protein, 18 aa, synthetic construct
KTINGQDSPHKSGQNLHM

SEQ ID NO: 5417 - protein, 18 aa, synthetic construct
KTINGRGSPHSKAQIGMT

SEQ ID NO: 5418 - protein, 18 aa, synthetic construct
KTINGRGSPHSKAQNQVL

SEQ ID NO: 5419 - protein, 18 aa, synthetic construct
KTINGRGSPHSKAQSPTT

SEQ ID NO: 5420 - protein, 18 aa, synthetic construct
KTINGRGSPHSKATSFQT

SEQ ID NO: 5421 - protein, 18 aa, synthetic construct
KTINGSGSPHFVVQNQQT

SEQ ID NO: 5422 - protein, 18 aa, synthetic construct
KTINGSGSPHKRGQKQQT

SEQ ID NO: 5423 - protein, 18 aa, synthetic construct
KTINGSGSPHKRGQNQET

SEQ ID NO: 5424 - protein, 18 aa, synthetic construct
KTINGSGSPHKRGQNQLT

SEQ ID NO: 5425 - protein, 18 aa, synthetic construct
KTINGSGSPHKRGRNQQT

SEQ ID NO: 5426 - protein, 18 aa, synthetic construct
KTINGSGSPHKSGGNQQT

SEQ ID NO: 5427 - protein, 18 aa, synthetic construct
KTINGSGSPHKSGHNQET

SEQ ID NO: 5428 - protein, 18 aa, synthetic construct
KTINGSGSPHKSGHNQLT

SEQ ID NO: 5429 - protein, 18 aa, synthetic construct
KTINGSGSPHKSGHNQQN

SEQ ID NO: 5430 - protein, 18 aa, synthetic construct
KTINGSGSPHKSGLNQLT

SEQ ID NO: 5431 - protein, 18 aa, synthetic construct
KTINGSGSPHKSGPNQQT

SEQ ID NO: 5432 - protein, 18 aa, synthetic construct
KTINGSGSPHKSGQGQQT

SEQ ID NO: 5433 - protein, 18 aa, synthetic construct
KTINGSGSPHKSGQHLQT

SEQ ID NO: 5434 - protein, 18 aa, synthetic construct
KTINGSGSPHKSGQHQQT

SEQ ID NO: 5435 - protein, 18 aa, synthetic construct
KTINGSGSPHKSGQKHQT

SEQ ID NO: 5436 - protein, 18 aa, synthetic construct
KTINGSGSPHKSGQKQQS

SEQ ID NO: 5437 - protein, 18 aa, synthetic construct
KTINGSGSPHKSGQNEQT

SEQ ID NO: 5438 - protein, 18 aa, synthetic construct
KTINGSGSPHKSGQNHQT

SEQ ID NO: 5439 - protein, 18 aa, synthetic construct
KTINGSGSPHKSGQNKQT

SEQ ID NO: 5440 - protein, 18 aa, synthetic construct
KTINGSGSPHKSGQNKTS

SEQ ID NO: 5441 - protein, 18 aa, synthetic construct
KTINGSGSPHKSGQNQEA

SEQ ID NO: 5442 - protein, 18 aa, synthetic construct
KTINGSGSPHKSGQNQET

SEQ ID NO: 5443 - protein, 18 aa, synthetic construct
KTINGSGSPHKSGQNQKT

SEQ ID NO: 5444 - protein, 18 aa, synthetic construct
KTINGSGSPHKSGQNQQI

SEQ ID NO: 5445 - protein, 18 aa, synthetic construct
KTINGSGSPHKSGQNQQR

SEQ ID NO: 5446 - protein, 18 aa, synthetic construct
KTINGSGSPHKSGQNQRT

SEQ ID NO: 5447 - protein, 18 aa, synthetic construct
KTINGSGSPHKSGQNQYT

SEQ ID NO: 5448 - protein, 18 aa, synthetic construct
KTINGSGSPHKSGQRQQT

SEQ ID NO: 5449 - protein, 18 aa, synthetic construct
KTINGSGSPHKSGQSQQT

SEQ ID NO: 5450 - protein, 18 aa, synthetic construct
KTINGSGSPHKSGQYQRT

SEQ ID NO: 5451 - protein, 18 aa, synthetic construct
KTINGSGSPHKSGRNQQA

SEQ ID NO: 5452 - protein, 18 aa, synthetic construct
KTINGSGSPHKSRHNQQT

SEQ ID NO: 5453 - protein, 18 aa, synthetic construct
KTINGSGSPHKSRQYQQT

SEQ ID NO: 5454 - protein, 18 aa, synthetic construct
KTINGSGSPHRKAQAPGT

SEQ ID NO: 5455 - protein, 18 aa, synthetic construct
KTINGSGSPHSKAAMKQT

SEQ ID NO: 5456 - protein, 18 aa, synthetic construct
KTINGSGSPHSKAGRQQT

SEQ ID NO: 5457 - protein, 18 aa, synthetic construct
KTINGSGSPHSKAGRTQT

SEQ ID NO: 5458 - protein, 18 aa, synthetic construct
KTINGSGSPHSKAKSNQT

SEQ ID NO: 5459 - protein, 18 aa, synthetic construct
KTINGSGSPHSKALKTQT

SEQ ID NO: 5460 - protein, 18 aa, synthetic construct
KTINGSGSPHSKAPRTQT

SEQ ID NO: 5461 - protein, 18 aa, synthetic construct
KTINGSGSPHSKAQAART

SEQ ID NO: 5462 - protein, 18 aa, synthetic construct
KTINGSGSPHSKAQAILT

SEQ ID NO: 5463 - protein, 18 aa, synthetic construct
KTINGSGSPHSKAQCRGT

SEQ ID NO: 5464 - protein, 18 aa, synthetic construct
KTINGSGSPHSKAQGLRT

SEQ ID NO: 5465 - protein, 18 aa, synthetic construct
KTINGSGSPHSKAQKGVL

SEQ ID NO: 5466 - protein, 18 aa, synthetic construct
KTINGSGSPHSKAQKSNT

SEQ ID NO: 5467 - protein, 18 aa, synthetic construct
KTINGSGSPHSKAQNNKF

SEQ ID NO: 5468 - protein, 18 aa, synthetic construct
KTINGSGSPHSKAQNRRT

SEQ ID NO: 5469 - protein, 18 aa, synthetic construct
KTINGSGSPHSKAQPKQT

SEQ ID NO: 5470 - protein, 18 aa, synthetic construct
KTINGSGSPHSKAQRAPT

SEQ ID NO: 5471 - protein, 18 aa, synthetic construct
KTINGSGSPHSKAQREHT

SEQ ID NO: 5472 - protein, 18 aa, synthetic construct
KTINGSGSPHSKAQRFGT

SEQ ID NO: 5473 - DNA, 2289 bp, synthetic construct
  source 1..2289: mol_type = other DNA
cctgcaggcagctgcgcgctcgctcgctcactgaggccgcccgggcaaagcccgggcgtcgggcgacctttggtcgcccggcctcagtgagcgagcgagcgcgcagagagggagtggccaactccatcactaggggttccttgtagttaatgattaacccgccatgctacttatctacgtagccatgcgtcgacataacgcgtcgacattgattattgactagttattaatagtaatcaattacggggtcattagttcatagcccatatatggagttccgcgttacataacttacggtaaatggcccgcctggctgaccgcccaacgacccccgcccattgacgtcaataatgacgtatgttcccatagtaacgccaatagggactttccattgacgtcaatgggtggagtatttacggtaaactgcccacttggcagtacatcaagtgtatcatatgccaagtacgccccctattgacgtcaatgacggtaaatggcccgcctggcattatgcccagtacatgaccttatgggactttcctacttggcagtacatctacgtattagtcatcgctattaccatgtcgaggccacgttctgcttcactctccccatctcccccccctccccacccccaattttgtatttatttattttttaattattttgtgcagcgatgggggcggggggggggggcgcgcgccaggcggggcggggcggggcgaggggcggggcggggcgaggcggagaggtgcggcggcagccaatcagagcggcgcgctccgaaagtttccttttatggcgaggcggcggcggcggcggccctataaaaagcgaagcgcgcggcgggcgggagcaagcttcgtttagtgaaccgtcagatcgcctggagacgccatccacgctgttttgacctccatagaagacaccgggaccgatccagcctccgcggattcgaatcccggccgggaacggtgcattggaacgcggattccccgtgccaagagtgacgtaagtaccgcctatagagtctataggcccacaaaaaatgctttcttcttttaatatacttttttgtttatcttatttctaatactttccctaatctctttctttcagggcaataatgatacaatgtatcatgcctctttgcaccattctaaagaataacagtgataatttctgggttaaggcaatagcaatatttctgcatataaatatttctgcatataaattgtaactgatgtaagaggtttcatattgctaatagcagctacaatccagctaccattctgcttttattttatggttgggataaggctggattattctgagtccaagctaggcccttttgctaatcatgttcatacctcttatcttcctcccacagctcctgggcaacgtgctggtctgtgtgctggcccatcactttggcaaagaattgggattcgaaccggtgtgctgggcggggggcggcgggccctcccgcagaacaccatgcgctcttcggaagactggaagcgatgacaaccctgtgacctggtttgtcatcgcttccagtcttctgaggagcgccttgacagcagccatgggagggccgccccctacctcagtgactcgaggggtggcatccctgtgacccctccccagtgcctctcctggccctggaagttgccactccagtgcccaccagccttgtcctaataaaattaagttgcatcattttgtctgactaggtgtccttctataatattatggggtggaggggggtggtatggagcaaggggcaagttgggaagacaacctgtagggcctgcggggtctattgggaaccaagctggagtgcagtggcacaatcttggctcactgcaatctccgcctcctgggttcaagcgattctcctgcctcagcctcccgagttgttgggattccaggcatgcatgaccaggctcagctaatttttgtttttttggtagagacggggtttcaccatattggccaggctggtctccaactcctaatctcaggtgatctacccaccttggcctcccaaattgctgggattacaggcgtgaaccactgctcccttccctgtccttatcgatgctacgtagataagtagcatggcgggttaatcattaactacagaggaacccctagtgatggagttggccactccctctctgcgcgctcgctcgctcactgaggccgggcgaccaaaggtcgcccgacgcccgggctttgcccgggcggcctcagtgagcgagcgagcgcgcagctgcctgcagg

SEQ ID NO: 5474 - DNA, 2289 bp, synthetic construct
  source 1..2289: mol_type = other DNA
cctgcaggcagctgcgcgctcgctcgctcactgaggccgcccgggcaaagcccgggcgtcgggcgacctttggtcgcccggcctcagtgagcgagcgagcgcgcagagagggagtggccaactccatcactaggggttccttgtagttaatgattaacccgccatgctacttatctacgtagccatgcgtcgacataacgcgtcgacattgattattgactagttattaatagtaatcaattacggggtcattagttcatagcccatatatggagttccgcgttacataacttacggtaaatggcccgcctggctgaccgcccaacgacccccgcccattgacgtcaataatgacgtatgttcccatagtaacgccaatagggactttccattgacgtcaatgggtggagtatttacggtaaactgcccacttggcagtacatcaagtgtatcatatgccaagtacgccccctattgacgtcaatgacggtaaatggcccgcctggcattatgcccagtacatgaccttatgggactttcctacttggcagtacatctacgtattagtcatcgctattaccatgtcgaggccacgttctgcttcactctccccatctcccccccctccccacccccaattttgtatttatttattttttaattattttgtgcagcgatgggggcggggggggggggcgcgcgccaggcggggcggggcggggcgaggggcggggcggggcgaggcggagaggtgcggcggcagccaatcagagcggcgcgctccgaaagtttccttttatggcgaggcggcggcggcggcggccctataaaaagcgaagcgcgcggcgggcgggagcaagcttcgtttagtgaaccgtcagatcgcctggagacgccatccacgctgttttgacctccatagaagacaccgggaccgatccagcctccgcggattcgaatcccggccgggaacggtgcattggaacgcggattccccgtgccaagagtgacgtaagtaccgcctatagagtctataggcccacaaaaaatgctttcttcttttaatatacttttttgtttatcttatttctaatactttccctaatctctttctttcagggcaataatgatacaatgtatcatgcctctttgcaccattctaaagaataacagtgataatttctgggttaaggcaatagcaatatttctgcatataaatatttctgcatataaattgtaactgatgtaagaggtttcatattgctaatagcagctacaatccagctaccattctgcttttattttatggttgggataaggctggattattctgagtccaagctaggcccttttgctaatcatgttcatacctcttatcttcctcccacagctcctgggcaacgtgctggtctgtgtgctggcccatcactttggcaaagaattgggattcgaaccggtgtgctgggcggggggcggcgggccctcccgcagaacaccatgcgctcttcggaacttccgcgagaacgccaaccctgtgacctggtttggcgttctcgcggaagttctgaggagcgccttgacagcagccatgggagggccgccccctacctcagtgactcgaggggtggcatccctgtgacccctccccagtgcctctcctggccctggaagttgccactccagtgcccaccagccttgtcctaataaaattaagttgcatcattttgtctgactaggtgtccttctataatattatggggtggaggggggtggtatggagcaaggggcaagttgggaagacaacctgtagggcctgcggggtctattgggaaccaagctggagtgcagtggcacaatcttggctcactgcaatctccgcctcctgggttcaagcgattctcctgcctcagcctcccgagttgttgggattccaggcatgcatgaccaggctcagctaatttttgtttttttggtagagacggggtttcaccatattggccaggctggtctccaactcctaatctcaggtgatctacccaccttggcctcccaaattgctgggattacaggcgtgaaccactgctcccttccctgtccttatcgatgctacgtagataagtagcatggcgggttaatcattaactacagaggaacccctagtgatggagttggccactccctctctgcgcgctcgctcgctcactgaggccgggcgaccaaaggtcgcccgacgcccgggctttgcccgggcggcctcagtgagcgagcgagcgcgcagctgcctgcagg

SEQ ID NO: 5475 - DNA, 2289 bp, synthetic construct
  source 1..2289: mol_type = other DNA
cctgcaggcagctgcgcgctcgctcgctcactgaggccgcccgggcaaagcccgggcgtcgggcgacctttggtcgcccggcctcagtgagcgagcgagcgcgcagagagggagtggccaactccatcactaggggttccttgtagttaatgattaacccgccatgctacttatctacgtagccatgcgtcgacataacgcgtcgacattgattattgactagttattaatagtaatcaattacggggtcattagttcatagcccatatatggagttccgcgttacataacttacggtaaatggcccgcctggctgaccgcccaacgacccccgcccattgacgtcaataatgacgtatgttcccatagtaacgccaatagggactttccattgacgtcaatgggtggagtatttacggtaaactgcccacttggcagtacatcaagtgtatcatatgccaagtacgccccctattgacgtcaatgacggtaaatggcccgcctggcattatgcccagtacatgaccttatgggactttcctacttggcagtacatctacgtattagtcatcgctattaccatgtcgaggccacgttctgcttcactctccccatctcccccccctccccacccccaattttgtatttatttattttttaattattttgtgcagcgatgggggcggggggggggggcgcgcgccaggcggggcggggcggggcgaggggcggggcggggcgaggcggagaggtgcggcggcagccaatcagagcggcgcgctccgaaagtttccttttatggcgaggcggcggcggcggcggccctataaaaagcgaagcgcgcggcgggcgggagcaagcttcgtttagtgaaccgtcagatcgcctggagacgccatccacgctgttttgacctccatagaagacaccgggaccgatccagcctccgcggattcgaatcccggccgggaacggtgcattggaacgcggattccccgtgccaagagtgacgtaagtaccgcctatagagtctataggcccacaaaaaatgctttcttcttttaatatacttttttgtttatcttatttctaatactttccctaatctctttctttcagggcaataatgatacaatgtatcatgcctctttgcaccattctaaagaataacagtgataatttctgggttaaggcaatagcaatatttctgcatataaatatttctgcatataaattgtaactgatgtaagaggtttcatattgctaatagcagctacaatccagctaccattctgcttttattttatggttgggataaggctggattattctgagtccaagctaggcccttttgctaatcatgttcatacctcttatcttcctcccacagctcctgggcaacgtgctggtctgtgtgctggcccatcactttggcaaagaattgggattcgaaccggtgtgctgggcggggggcggcgggccctcccgcagaacaccatgcgctcttcggaagcatcgacatggtagactccctgtgacctggtagtctaccatgtcgatgcttctgaggagcgccttgacagcagccatgggagggccgccccctacctcagtgactcgaggggtggcatccctgtgacccctccccagtgcctctcctggccctggaagttgccactccagtgcccaccagccttgtcctaataaaattaagttgcatcattttgtctgactaggtgtccttctataatattatggggtggaggggggtggtatggagcaaggggcaagttgggaagacaacctgtagggcctgcggggtctattgggaaccaagctggagtgcagtggcacaatcttggctcactgcaatctccgcctcctgggttcaagcgattctcctgcctcagcctcccgagttgttgggattccaggcatgcatgaccaggctcagctaatttttgtttttttggtagagacggggtttcaccatattggccaggctggtctccaactcctaatctcaggtgatctacccaccttggcctcccaaattgctgggattacaggcgtgaaccactgctcccttccctgtccttatcgatgctacgtagataagtagcatggcgggttaatcattaactacagaggaacccctagtgatggagttggccactccctctctgcgcgctcgctcgctcactgaggccgggcgaccaaaggtcgcccgacgcccgggctttgcccgggcggcctcagtgagcgagcgagcgcgcagctgcctgcagg

SEQ ID NO: 5476 - DNA, 2289 bp, synthetic construct
  source 1..2289: mol_type = other DNA
cctgcaggcagctgcgcgctcgctcgctcactgaggccgcccgggcaaagcccgggcgtcgggcgacctttggtcgcccggcctcagtgagcgagcgagcgcgcagagagggagtggccaactccatcactaggggttccttgtagttaatgattaacccgccatgctacttatctacgtagccatgcgtcgacataacgcgtcgacattgattattgactagttattaatagtaatcaattacggggtcattagttcatagcccatatatggagttccgcgttacataacttacggtaaatggcccgcctggctgaccgcccaacgacccccgcccattgacgtcaataatgacgtatgttcccatagtaacgccaatagggactttccattgacgtcaatgggtggagtatttacggtaaactgcccacttggcagtacatcaagtgtatcatatgccaagtacgccccctattgacgtcaatgacggtaaatggcccgcctggcattatgcccagtacatgaccttatgggactttcctacttggcagtacatctacgtattagtcatcgctattaccatgtcgaggccacgttctgcttcactctccccatctcccccccctccccacccccaattttgtatttatttattttttaattattttgtgcagcgatgggggcggggggggggggcgcgcgccaggcggggcggggcggggcgaggggcggggcggggcgaggcggagaggtgcggcggcagccaatcagagcggcgcgctccgaaagtttccttttatggcgaggcggcggcggcggcggccctataaaaagcgaagcgcgcggcgggcgggagcaagcttcgtttagtgaaccgtcagatcgcctggagacgccatccacgctgttttgacctccatagaagacaccgggaccgatccagcctccgcggattcgaatcccggccgggaacggtgcattggaacgcggattccccgtgccaagagtgacgtaagtaccgcctatagagtctataggcccacaaaaaatgctttcttcttttaatatacttttttgtttatcttatttctaatactttccctaatctctttctttcagggcaataatgatacaatgtatcatgcctctttgcaccattctaaagaataacagtgataatttctgggttaaggcaatagcaatatttctgcatataaatatttctgcatataaattgtaactgatgtaagaggtttcatattgctaatagcagctacaatccagctaccattctgcttttattttatggttgggataaggctggattattctgagtccaagctaggcccttttgctaatcatgttcatacctcttatcttcctcccacagctcctgggcaacgtgctggtctgtgtgctggcccatcactttggcaaagaattgggattcgaaccggtgtgctgggcggggggcggcgggccctcccgcagaacaccatgcgctcttcggaagctcctcgcagttcggttccctgtgacctggtaaccgaactgcgaggagcttctgaggagcgccttgacagcagccatgggagggccgccccctacctcagtgactcgaggggtggcatccctgtgacccctccccagtgcctctcctggccctggaagttgccactccagtgcccaccagccttgtcctaataaaattaagttgcatcattttgtctgactaggtgtccttctataatattatggggtggaggggggtggtatggagcaaggggcaagttgggaagacaacctgtagggcctgcggggtctattgggaaccaagctggagtgcagtggcacaatcttggctcactgcaatctccgcctcctgggttcaagcgattctcctgcctcagcctcccgagttgttgggattccaggcatgcatgaccaggctcagctaatttttgtttttttggtagagacggggtttcaccatattggccaggctggtctccaactcctaatctcaggtgatctacccaccttggcctcccaaattgctgggattacaggcgtgaaccactgctcccttccctgtccttatcgatgctacgtagataagtagcatggcgggttaatcattaactacagaggaacccctagtgatggagttggccactccctctctgcgcgctcgctcgctcactgaggccgggcgaccaaaggtcgcccgacgcccgggctttgcccgggcggcctcagtgagcgagcgagcgcgcagctgcctgcagg

SEQ ID NO: 5477 - DNA, 2289 bp, synthetic construct
  source 1..2289: mol_type = other DNA
cctgcaggcagctgcgcgctcgctcgctcactgaggccgcccgggcaaagcccgggcgtcgggcgacctttggtcgcccggcctcagtgagcgagcgagcgcgcagagagggagtggccaactccatcactaggggttccttgtagttaatgattaacccgccatgctacttatctacgtagccatgcgtcgacataacgcgtcgacattgattattgactagttattaatagtaatcaattacggggtcattagttcatagcccatatatggagttccgcgttacataacttacggtaaatggcccgcctggctgaccgcccaacgacccccgcccattgacgtcaataatgacgtatgttcccatagtaacgccaatagggactttccattgacgtcaatgggtggagtatttacggtaaactgcccacttggcagtacatcaagtgtatcatatgccaagtacgccccctattgacgtcaatgacggtaaatggcccgcctggcattatgcccagtacatgaccttatgggactttcctacttggcagtacatctacgtattagtcatcgctattaccatgtcgaggccacgttctgcttcactctccccatctcccccccctccccacccccaattttgtatttatttattttttaattattttgtgcagcgatgggggcggggggggggggcgcgcgccaggcggggcggggcggggcgaggggcggggcggggcgaggcggagaggtgcggcggcagccaatcagagcggcgcgctccgaaagtttccttttatggcgaggcggcggcggcggcggccctataaaaagcgaagcgcgcggcgggcgggagcaagcttcgtttagtgaaccgtcagatcgcctggagacgccatccacgctgttttgacctccatagaagacaccgggaccgatccagcctccgcggattcgaatcccggccgggaacggtgcattggaacgcggattccccgtgccaagagtgacgtaagtaccgcctatagagtctataggcccacaaaaaatgctttcttcttttaatatacttttttgtttatcttatttctaatactttccctaatctctttctttcagggcaataatgatacaatgtatcatgcctctttgcaccattctaaagaataacagtgataatttctgggttaaggcaatagcaatatttctgcatataaatatttctgcatataaattgtaactgatgtaagaggtttcatattgctaatagcagctacaatccagctaccattctgcttttattttatggttgggataaggctggattattctgagtccaagctaggcccttttgctaatcatgttcatacctcttatcttcctcccacagctcctgggcaacgtgctggtctgtgtgctggcccatcactttggcaaagaattgggattcgaaccggtgtgctgggcggggggcggcgggccctcccgcagaacaccatgcgctcttcggaaggctttggctcgggacttccctgtgacctggtaagtcccgagccaaagccttctgaggagcgccttgacagcagccatgggagggccgccccctacctcagtgactcgaggggtggcatccctgtgacccctccccagtgcctctcctggccctggaagttgccactccagtgcccaccagccttgtcctaataaaattaagttgcatcattttgtctgactaggtgtccttctataatattatggggtggaggggggtggtatggagcaaggggcaagttgggaagacaacctgtagggcctgcggggtctattgggaaccaagctggagtgcagtggcacaatcttggctcactgcaatctccgcctcctgggttcaagcgattctcctgcctcagcctcccgagttgttgggattccaggcatgcatgaccaggctcagctaatttttgtttttttggtagagacggggtttcaccatattggccaggctggtctccaactcctaatctcaggtgatctacccaccttggcctcccaaattgctgggattacaggcgtgaaccactgctcccttccctgtccttatcgatgctacgtagataagtagcatggcgggttaatcattaactacagaggaacccctagtgatggagttggccactccctctctgcgcgctcgctcgctcactgaggccgggcgaccaaaggtcgcccgacgcccgggctttgcccgggcggcctcagtgagcgagcgagcgcgcagctgcctgcagg

SEQ ID NO: 5478 - DNA, 2289 bp, synthetic construct
  source 1..2289: mol_type = other DNA
cctgcaggcagctgcgcgctcgctcgctcactgaggccgcccgggcaaagcccgggcgtcgggcgacctttggtcgcccggcctcagtgagcgagcgagcgcgcagagagggagtggccaactccatcactaggggttccttgtagttaatgattaacccgccatgctacttatctacgtagccatgcgtcgacataacgcgtcgacattgattattgactagttattaatagtaatcaattacggggtcattagttcatagcccatatatggagttccgcgttacataacttacggtaaatggcccgcctggctgaccgcccaacgacccccgcccattgacgtcaataatgacgtatgttcccatagtaacgccaatagggactttccattgacgtcaatgggtggagtatttacggtaaactgcccacttggcagtacatcaagtgtatcatatgccaagtacgccccctattgacgtcaatgacggtaaatggcccgcctggcattatgcccagtacatgaccttatgggactttcctacttggcagtacatctacgtattagtcatcgctattaccatgtcgaggccacgttctgcttcactctccccatctcccccccctccccacccccaattttgtatttatttattttttaattattttgtgcagcgatgggggcggggggggggggcgcgcgccaggcggggcggggcggggcgaggggcggggcggggcgaggcggagaggtgcggcggcagccaatcagagcggcgcgctccgaaagtttccttttatggcgaggcggcggcggcggcggccctataaaaagcgaagcgcgcggcgggcgggagcaagcttcgtttagtgaaccgtcagatcgcctggagacgccatccacgctgttttgacctccatagaagacaccgggaccgatccagcctccgcggattcgaatcccggccgggaacggtgcattggaacgcggattccccgtgccaagagtgacgtaagtaccgcctatagagtctataggcccacaaaaaatgctttcttcttttaatatacttttttgtttatcttatttctaatactttccctaatctctttctttcagggcaataatgatacaatgtatcatgcctctttgcaccattctaaagaataacagtgataatttctgggttaaggcaatagcaatatttctgcatataaatatttctgcatataaattgtaactgatgtaagaggtttcatattgctaatagcagctacaatccagctaccattctgcttttattttatggttgggataaggctggattattctgagtccaagctaggcccttttgctaatcatgttcatacctcttatcttcctcccacagctcctgggcaacgtgctggtctgtgtgctggcccatcactttggcaaagaattgggattcgaaccggtgtgctgggcggggggcggcgggccctcccgcagaacaccatgcgctcttcggaagactggaagcgatgacaaacctgtgacctggtttgtcatcgcttccagtcttctgaggagcgccttgacagcagccatgggagggccgccccctacctcagtgactcgaggggtggcatccctgtgacccctccccagtgcctctcctggccctggaagttgccactccagtgcccaccagccttgtcctaataaaattaagttgcatcattttgtctgactaggtgtccttctataatattatggggtggaggggggtggtatggagcaaggggcaagttgggaagacaacctgtagggcctgcggggtctattgggaaccaagctggagtgcagtggcacaatcttggctcactgcaatctccgcctcctgggttcaagcgattctcctgcctcagcctcccgagttgttgggattccaggcatgcatgaccaggctcagctaatttttgtttttttggtagagacggggtttcaccatattggccaggctggtctccaactcctaatctcaggtgatctacccaccttggcctcccaaattgctgggattacaggcgtgaaccactgctcccttccctgtccttatcgatgctacgtagataagtagcatggcgggttaatcattaactacagaggaacccctagtgatggagttggccactccctctctgcgcgctcgctcgctcactgaggccgggcgaccaaaggtcgcccgacgcccgggctttgcccgggcggcctcagtgagcgagcgagcgcgcagctgcctgcagg

SEQ ID NO: 5479 - DNA, 2289 bp, synthetic construct
  source 1..2289: mol_type = other DNA
cctgcaggcagctgcgcgctcgctcgctcactgaggccgcccgggcaaagcccgggcgtcgggcgacctttggtcgcccggcctcagtgagcgagcgagcgcgcagagagggagtggccaactccatcactaggggttccttgtagttaatgattaacccgccatgctacttatctacgtagccatgcgtcgacataacgcgtcgacattgattattgactagttattaatagtaatcaattacggggtcattagttcatagcccatatatggagttccgcgttacataacttacggtaaatggcccgcctggctgaccgcccaacgacccccgcccattgacgtcaataatgacgtatgttcccatagtaacgccaatagggactttccattgacgtcaatgggtggagtatttacggtaaactgcccacttggcagtacatcaagtgtatcatatgccaagtacgccccctattgacgtcaatgacggtaaatggcccgcctggcattatgcccagtacatgaccttatgggactttcctacttggcagtacatctacgtattagtcatcgctattaccatgtcgaggccacgttctgcttcactctccccatctcccccccctccccacccccaattttgtatttatttattttttaattattttgtgcagcgatgggggcggggggggggggcgcgcgccaggcggggcggggcggggcgaggggcggggcggggcgaggcggagaggtgcggcggcagccaatcagagcggcgcgctccgaaagtttccttttatggcgaggcggcggcggcggcggccctataaaaagcgaagcgcgcggcgggcgggagcaagcttcgtttagtgaaccgtcagatcgcctggagacgccatccacgctgttttgacctccatagaagacaccgggaccgatccagcctccgcggattcgaatcccggccgggaacggtgcattggaacgcggattccccgtgccaagagtgacgtaagtaccgcctatagagtctataggcccacaaaaaatgctttcttcttttaatatacttttttgtttatcttatttctaatactttccctaatctctttctttcagggcaataatgatacaatgtatcatgcctctttgcaccattctaaagaataacagtgataatttctgggttaaggcaatagcaatatttctgcatataaatatttctgcatataaattgtaactgatgtaagaggtttcatattgctaatagcagctacaatccagctaccattctgcttttattttatggttgggataaggctggattattctgagtccaagctaggcccttttgctaatcatgttcatacctcttatcttcctcccacagctcctgggcaacgtgctggtctgtgtgctggcccatcactttggcaaagaattgggattcgaaccggtgtgctgggcggggggcggcgggccctcccgcagaacaccatgcgctcttcggaacttccgcgagaacgccaaacctgtgacctggtttggcgttctcgcggaagttctgaggagcgccttgacagcagccatgggagggccgccccctacctcagtgactcgaggggtggcatccctgtgacccctccccagtgcctctcctggccctggaagttgccactccagtgcccaccagccttgtcctaataaaattaagttgcatcattttgtctgactaggtgtccttctataatattatggggtggaggggggtggtatggagcaaggggcaagttgggaagacaacctgtagggcctgcggggtctattgggaaccaagctggagtgcagtggcacaatcttggctcactgcaatctccgcctcctgggttcaagcgattctcctgcctcagcctcccgagttgttgggattccaggcatgcatgaccaggctcagctaatttttgtttttttggtagagacggggtttcaccatattggccaggctggtctccaactcctaatctcaggtgatctacccaccttggcctcccaaattgctgggattacaggcgtgaaccactgctcccttccctgtccttatcgatgctacgtagataagtagcatggcgggttaatcattaactacagaggaacccctagtgatggagttggccactccctctctgcgcgctcgctcgctcactgaggccgggcgaccaaaggtcgcccgacgcccgggctttgcccgggcggcctcagtgagcgagcgagcgcgcagctgcctgcagg

SEQ ID NO: 5480 - DNA, 2289 bp, synthetic construct
  source 1..2289: mol_type = other DNA
cctgcaggcagctgcgcgctcgctcgctcactgaggccgcccgggcaaagcccgggcgtcgggcgacctttggtcgcccggcctcagtgagcgagcgagcgcgcagagagggagtggccaactccatcactaggggttccttgtagttaatgattaacccgccatgctacttatctacgtagccatgcgtcgacataacgcgtcgacattgattattgactagttattaatagtaatcaattacggggtcattagttcatagcccatatatggagttccgcgttacataacttacggtaaatggcccgcctggctgaccgcccaacgacccccgcccattgacgtcaataatgacgtatgttcccatagtaacgccaatagggactttccattgacgtcaatgggtggagtatttacggtaaactgcccacttggcagtacatcaagtgtatcatatgccaagtacgccccctattgacgtcaatgacggtaaatggcccgcctggcattatgcccagtacatgaccttatgggactttcctacttggcagtacatctacgtattagtcatcgctattaccatgtcgaggccacgttctgcttcactctccccatctcccccccctccccacccccaattttgtatttatttattttttaattattttgtgcagcgatgggggcggggggggggggcgcgcgccaggcggggcggggcggggcgaggggcggggcggggcgaggcggagaggtgcggcggcagccaatcagagcggcgcgctccgaaagtttccttttatggcgaggcggcggcggcggcggccctataaaaagcgaagcgcgcggcgggcgggagcaagcttcgtttagtgaaccgtcagatcgcctggagacgccatccacgctgttttgacctccatagaagacaccgggaccgatccagcctccgcggattcgaatcccggccgggaacggtgcattggaacgcggattccccgtgccaagagtgacgtaagtaccgcctatagagtctataggcccacaaaaaatgctttcttcttttaatatacttttttgtttatcttatttctaatactttccctaatctctttctttcagggcaataatgatacaatgtatcatgcctctttgcaccattctaaagaataacagtgataatttctgggttaaggcaatagcaatatttctgcatataaatatttctgcatataaattgtaactgatgtaagaggtttcatattgctaatagcagctacaatccagctaccattctgcttttattttatggttgggataaggctggattattctgagtccaagctaggcccttttgctaatcatgttcatacctcttatcttcctcccacagctcctgggcaacgtgctggtctgtgtgctggcccatcactttggcaaagaattgggattcgaaccggtgtgctgggcggggggcggcgggccctcccgcagaacaccatgcgctcttcggaagcatcgacatggtagactacctgtgacctggtagtctaccatgtcgatgcttctgaggagcgccttgacagcagccatgggagggccgccccctacctcagtgactcgaggggtggcatccctgtgacccctccccagtgcctctcctggccctggaagttgccactccagtgcccaccagccttgtcctaataaaattaagttgcatcattttgtctgactaggtgtccttctataatattatggggtggaggggggtggtatggagcaaggggcaagttgggaagacaacctgtagggcctgcggggtctattgggaaccaagctggagtgcagtggcacaatcttggctcactgcaatctccgcctcctgggttcaagcgattctcctgcctcagcctcccgagttgttgggattccaggcatgcatgaccaggctcagctaatttttgtttttttggtagagacggggtttcaccatattggccaggctggtctccaactcctaatctcaggtgatctacccaccttggcctcccaaattgctgggattacaggcgtgaaccactgctcccttccctgtccttatcgatgctacgtagataagtagcatggcgggttaatcattaactacagaggaacccctagtgatggagttggccactccctctctgcgcgctcgctcgctcactgaggccgggcgaccaaaggtcgcccgacgcccgggctttgcccgggcggcctcagtgagcgagcgagcgcgcagctgcctgcagg

SEQ ID NO: 5481 - DNA, 2289 bp, synthetic construct
  source 1..2289: mol_type = other DNA
cctgcaggcagctgcgcgctcgctcgctcactgaggccgcccgggcaaagcccgggcgtcgggcgacctttggtcgcccggcctcagtgagcgagcgagcgcgcagagagggagtggccaactccatcactaggggttccttgtagttaatgattaacccgccatgctacttatctacgtagccatgcgtcgacataacgcgtcgacattgattattgactagttattaatagtaatcaattacggggtcattagttcatagcccatatatggagttccgcgttacataacttacggtaaatggcccgcctggctgaccgcccaacgacccccgcccattgacgtcaataatgacgtatgttcccatagtaacgccaatagggactttccattgacgtcaatgggtggagtatttacggtaaactgcccacttggcagtacatcaagtgtatcatatgccaagtacgccccctattgacgtcaatgacggtaaatggcccgcctggcattatgcccagtacatgaccttatgggactttcctacttggcagtacatctacgtattagtcatcgctattaccatgtcgaggccacgttctgcttcactctccccatctcccccccctccccacccccaattttgtatttatttattttttaattattttgtgcagcgatgggggcggggggggggggcgcgcgccaggcggggcggggcggggcgaggggcggggcggggcgaggcggagaggtgcggcggcagccaatcagagcggcgcgctccgaaagtttccttttatggcgaggcggcggcggcggcggccctataaaaagcgaagcgcgcggcgggcgggagcaagcttcgtttagtgaaccgtcagatcgcctggagacgccatccacgctgttttgacctccatagaagacaccgggaccgatccagcctccgcggattcgaatcccggccgggaacggtgcattggaacgcggattccccgtgccaagagtgacgtaagtaccgcctatagagtctataggcccacaaaaaatgctttcttcttttaatatacttttttgtttatcttatttctaatactttccctaatctctttctttcagggcaataatgatacaatgtatcatgcctctttgcaccattctaaagaataacagtgataatttctgggttaaggcaatagcaatatttctgcatataaatatttctgcatataaattgtaactgatgtaagaggtttcatattgctaatagcagctacaatccagctaccattctgcttttattttatggttgggataaggctggattattctgagtccaagctaggcccttttgctaatcatgttcatacctcttatcttcctcccacagctcctgggcaacgtgctggtctgtgtgctggcccatcactttggcaaagaattgggattcgaaccggtgtgctgggcggggggcggcgggccctcccgcagaacaccatgcgctcttcggaagctcctcgcagttcggttgcctgtgacctggtaaccgaactgcgaggagcttctgaggagcgccttgacagcagccatgggagggccgccccctacctcagtgactcgaggggtggcatccctgtgacccctccccagtgcctctcctggccctggaagttgccactccagtgcccaccagccttgtcctaataaaattaagttgcatcattttgtctgactaggtgtccttctataatattatggggtggaggggggtggtatggagcaaggggcaagttgggaagacaacctgtagggcctgcggggtctattgggaaccaagctggagtgcagtggcacaatcttggctcactgcaatctccgcctcctgggttcaagcgattctcctgcctcagcctcccgagttgttgggattccaggcatgcatgaccaggctcagctaatttttgtttttttggtagagacggggtttcaccatattggccaggctggtctccaactcctaatctcaggtgatctacccaccttggcctcccaaattgctgggattacaggcgtgaaccactgctcccttccctgtccttatcgatgctacgtagataagtagcatggcgggttaatcattaactacagaggaacccctagtgatggagttggccactccctctctgcgcgctcgctcgctcactgaggccgggcgaccaaaggtcgcccgacgcccgggctttgcccgggcggcctcagtgagcgagcgagcgcgcagctgcctgcagg

SEQ ID NO: 5482 - DNA, 2289 bp, synthetic construct
  source 1..2289: mol_type = other DNA
cctgcaggcagctgcgcgctcgctcgctcactgaggccgcccgggcaaagcccgggcgtcgggcgacctttggtcgcccggcctcagtgagcgagcgagcgcgcagagagggagtggccaactccatcactaggggttccttgtagttaatgattaacccgccatgctacttatctacgtagccatgcgtcgacataacgcgtcgacattgattattgactagttattaatagtaatcaattacggggtcattagttcatagcccatatatggagttccgcgttacataacttacggtaaatggcccgcctggctgaccgcccaacgacccccgcccattgacgtcaataatgacgtatgttcccatagtaacgccaatagggactttccattgacgtcaatgggtggagtatttacggtaaactgcccacttggcagtacatcaagtgtatcatatgccaagtacgccccctattgacgtcaatgacggtaaatggcccgcctggcattatgcccagtacatgaccttatgggactttcctacttggcagtacatctacgtattagtcatcgctattaccatgtcgaggccacgttctgcttcactctccccatctcccccccctccccacccccaattttgtatttatttattttttaattattttgtgcagcgatgggggcggggggggggggcgcgcgccaggcggggcggggcggggcgaggggcggggcggggcgaggcggagaggtgcggcggcagccaatcagagcggcgcgctccgaaagtttccttttatggcgaggcggcggcggcggcggccctataaaaagcgaagcgcgcggcgggcgggagcaagcttcgtttagtgaaccgtcagatcgcctggagacgccatccacgctgttttgacctccatagaagacaccgggaccgatccagcctccgcggattcgaatcccggccgggaacggtgcattggaacgcggattccccgtgccaagagtgacgtaagtaccgcctatagagtctataggcccacaaaaaatgctttcttcttttaatatacttttttgtttatcttatttctaatactttccctaatctctttctttcagggcaataatgatacaatgtatcatgcctctttgcaccattctaaagaataacagtgataatttctgggttaaggcaatagcaatatttctgcatataaatatttctgcatataaattgtaactgatgtaagaggtttcatattgctaatagcagctacaatccagctaccattctgcttttattttatggttgggataaggctggattattctgagtccaagctaggcccttttgctaatcatgttcatacctcttatcttcctcccacagctcctgggcaacgtgctggtctgtgtgctggcccatcactttggcaaagaattgggattcgaaccggtgtgctgggcggggggcggcgggccctcccgcagaacaccatgcgctcttcggaaggctttggctcgggacttacctgtgacctggtaagtcccgagccaaagccttctgaggagcgccttgacagcagccatgggagggccgccccctacctcagtgactcgaggggtggcatccctgtgacccctccccagtgcctctcctggccctggaagttgccactccagtgcccaccagccttgtcctaataaaattaagttgcatcattttgtctgactaggtgtccttctataatattatggggtggaggggggtggtatggagcaaggggcaagttgggaagacaacctgtagggcctgcggggtctattgggaaccaagctggagtgcagtggcacaatcttggctcactgcaatctccgcctcctgggttcaagcgattctcctgcctcagcctcccgagttgttgggattccaggcatgcatgaccaggctcagctaatttttgtttttttggtagagacggggtttcaccatattggccaggctggtctccaactcctaatctcaggtgatctacccaccttggcctcccaaattgctgggattacaggcgtgaaccactgctcccttccctgtccttatcgatgctacgtagataagtagcatggcgggttaatcattaactacagaggaacccctagtgatggagttggccactccctctctgcgcgctcgctcgctcactgaggccgggcgaccaaaggtcgcccgacgcccgggctttgcccgggcggcctcagtgagcgagcgagcgcgcagctgcctgcagg

SEQ ID NO: 5483 - DNA, 2289 bp, synthetic construct
  source 1..2289: mol_type = other DNA
cctgcaggcagctgcgcgctcgctcgctcactgaggccgcccgggcaaagcccgggcgtcgggcgacctttggtcgcccggcctcagtgagcgagcgagcgcgcagagagggagtggccaactccatcactaggggttccttgtagttaatgattaacccgccatgctacttatctacgtagccatgcgtcgacataacgcgtcgacattgattattgactagttattaatagtaatcaattacggggtcattagttcatagcccatatatggagttccgcgttacataacttacggtaaatggcccgcctggctgaccgcccaacgacccccgcccattgacgtcaataatgacgtatgttcccatagtaacgccaatagggactttccattgacgtcaatgggtggagtatttacggtaaactgcccacttggcagtacatcaagtgtatcatatgccaagtacgccccctattgacgtcaatgacggtaaatggcccgcctggcattatgcccagtacatgaccttatgggactttcctacttggcagtacatctacgtattagtcatcgctattaccatgtcgaggccacgttctgcttcactctccccatctcccccccctccccacccccaattttgtatttatttattttttaattattttgtgcagcgatgggggcggggggggggggcgcgcgccaggcggggcggggcggggcgaggggcggggcggggcgaggcggagaggtgcggcggcagccaatcagagcggcgcgctccgaaagtttccttttatggcgaggcggcggcggcggcggccctataaaaagcgaagcgcgcggcgggcgggagcaagcttcgtttagtgaaccgtcagatcgcctggagacgccatccacgctgttttgacctccatagaagacaccgggaccgatccagcctccgcggattcgaatcccggccgggaacggtgcattggaacgcggattccccgtgccaagagtgacgtaagtaccgcctatagagtctataggcccacaaaaaatgctttcttcttttaatatacttttttgtttatcttatttctaatactttccctaatctctttctttcagggcaataatgatacaatgtatcatgcctctttgcaccattctaaagaataacagtgataatttctgggttaaggcaatagcaatatttctgcatataaatatttctgcatataaattgtaactgatgtaagaggtttcatattgctaatagcagctacaatccagctaccattctgcttttattttatggttgggataaggctggattattctgagtccaagctaggcccttttgctaatcatgttcatacctcttatcttcctcccacagctcctgggcaacgtgctggtctgtgtgctggcccatcactttggcaaagaattgggattcgaaccggtgtgctgggcggggggcggcgggccctcccgcagaacaccatgcgctcttcggaagactggaagcgatgacaatcctgtgatttggtttgtcatcgcttccagtcttctgaggagcgccttgacagcagccatgggagggccgccccctacctcagtgactcgaggggtggcatccctgtgacccctccccagtgcctctcctggccctggaagttgccactccagtgcccaccagccttgtcctaataaaattaagttgcatcattttgtctgactaggtgtccttctataatattatggggtggaggggggtggtatggagcaaggggcaagttgggaagacaacctgtagggcctgcggggtctattgggaaccaagctggagtgcagtggcacaatcttggctcactgcaatctccgcctcctgggttcaagcgattctcctgcctcagcctcccgagttgttgggattccaggcatgcatgaccaggctcagctaatttttgtttttttggtagagacggggtttcaccatattggccaggctggtctccaactcctaatctcaggtgatctacccaccttggcctcccaaattgctgggattacaggcgtgaaccactgctcccttccctgtccttatcgatgctacgtagataagtagcatggcgggttaatcattaactacagaggaacccctagtgatggagttggccactccctctctgcgcgctcgctcgctcactgaggccgggcgaccaaaggtcgcccgacgcccgggctttgcccgggcggcctcagtgagcgagcgagcgcgcagctgcctgcagg

SEQ ID NO: 5484 - DNA, 2289 bp, synthetic construct
  source 1..2289: mol_type = other DNA
cctgcaggcagctgcgcgctcgctcgctcactgaggccgcccgggcaaagcccgggcgtcgggcgacctttggtcgcccggcctcagtgagcgagcgagcgcgcagagagggagtggccaactccatcactaggggttccttgtagttaatgattaacccgccatgctacttatctacgtagccatgcgtcgacataacgcgtcgacattgattattgactagttattaatagtaatcaattacggggtcattagttcatagcccatatatggagttccgcgttacataacttacggtaaatggcccgcctggctgaccgcccaacgacccccgcccattgacgtcaataatgacgtatgttcccatagtaacgccaatagggactttccattgacgtcaatgggtggagtatttacggtaaactgcccacttggcagtacatcaagtgtatcatatgccaagtacgccccctattgacgtcaatgacggtaaatggcccgcctggcattatgcccagtacatgaccttatgggactttcctacttggcagtacatctacgtattagtcatcgctattaccatgtcgaggccacgttctgcttcactctccccatctcccccccctccccacccccaattttgtatttatttattttttaattattttgtgcagcgatgggggcggggggggggggcgcgcgccaggcggggcggggcggggcgaggggcggggcggggcgaggcggagaggtgcggcggcagccaatcagagcggcgcgctccgaaagtttccttttatggcgaggcggcggcggcggcggccctataaaaagcgaagcgcgcggcgggcgggagcaagcttcgtttagtgaaccgtcagatcgcctggagacgccatccacgctgttttgacctccatagaagacaccgggaccgatccagcctccgcggattcgaatcccggccgggaacggtgcattggaacgcggattccccgtgccaagagtgacgtaagtaccgcctatagagtctataggcccacaaaaaatgctttcttcttttaatatacttttttgtttatcttatttctaatactttccctaatctctttctttcagggcaataatgatacaatgtatcatgcctctttgcaccattctaaagaataacagtgataatttctgggttaaggcaatagcaatatttctgcatataaatatttctgcatataaattgtaactgatgtaagaggtttcatattgctaatagcagctacaatccagctaccattctgcttttattttatggttgggataaggctggattattctgagtccaagctaggcccttttgctaatcatgttcatacctcttatcttcctcccacagctcctgggcaacgtgctggtctgtgtgctggcccatcactttggcaaagaattgggattcgaaccggtgtgctgggcggggggcggcgggccctcccgcagaacaccatgcgctcttcggaacttccgcgagaacgccaatcctgtgatttggtttggcgttctcgcggaagttctgaggagcgccttgacagcagccatgggagggccgccccctacctcagtgactcgaggggtggcatccctgtgacccctccccagtgcctctcctggccctggaagttgccactccagtgcccaccagccttgtcctaataaaattaagttgcatcattttgtctgactaggtgtccttctataatattatggggtggaggggggtggtatggagcaaggggcaagttgggaagacaacctgtagggcctgcggggtctattgggaaccaagctggagtgcagtggcacaatcttggctcactgcaatctccgcctcctgggttcaagcgattctcctgcctcagcctcccgagttgttgggattccaggcatgcatgaccaggctcagctaatttttgtttttttggtagagacggggtttcaccatattggccaggctggtctccaactcctaatctcaggtgatctacccaccttggcctcccaaattgctgggattacaggcgtgaaccactgctcccttccctgtccttatcgatgctacgtagataagtagcatggcgggttaatcattaactacagaggaacccctagtgatggagttggccactccctctctgcgcgctcgctcgctcactgaggccgggcgaccaaaggtcgcccgacgcccgggctttgcccgggcggcctcagtgagcgagcgagcgcgcagctgcctgcagg

SEQ ID NO: 5485 - DNA, 2289 bp, synthetic construct
  source 1..2289: mol_type = other DNA
cctgcaggcagctgcgcgctcgctcgctcactgaggccgcccgggcaaagcccgggcgtcgggcgacctttggtcgcccggcctcagtgagcgagcgagcgcgcagagagggagtggccaactccatcactaggggttccttgtagttaatgattaacccgccatgctacttatctacgtagccatgcgtcgacataacgcgtcgacattgattattgactagttattaatagtaatcaattacggggtcattagttcatagcccatatatggagttccgcgttacataacttacggtaaatggcccgcctggctgaccgcccaacgacccccgcccattgacgtcaataatgacgtatgttcccatagtaacgccaatagggactttccattgacgtcaatgggtggagtatttacggtaaactgcccacttggcagtacatcaagtgtatcatatgccaagtacgccccctattgacgtcaatgacggtaaatggcccgcctggcattatgcccagtacatgaccttatgggactttcctacttggcagtacatctacgtattagtcatcgctattaccatgtcgaggccacgttctgcttcactctccccatctcccccccctccccacccccaattttgtatttatttattttttaattattttgtgcagcgatgggggcggggggggggggcgcgcgccaggcggggcggggcggggcgaggggcggggcggggcgaggcggagaggtgcggcggcagccaatcagagcggcgcgctccgaaagtttccttttatggcgaggcggcggcggcggcggccctataaaaagcgaagcgcgcggcgggcgggagcaagcttcgtttagtgaaccgtcagatcgcctggagacgccatccacgctgttttgacctccatagaagacaccgggaccgatccagcctccgcggattcgaatcccggccgggaacggtgcattggaacgcggattccccgtgccaagagtgacgtaagtaccgcctatagagtctataggcccacaaaaaatgctttcttcttttaatatacttttttgtttatcttatttctaatactttccctaatctctttctttcagggcaataatgatacaatgtatcatgcctctttgcaccattctaaagaataacagtgataatttctgggttaaggcaatagcaatatttctgcatataaatatttctgcatataaattgtaactgatgtaagaggtttcatattgctaatagcagctacaatccagctaccattctgcttttattttatggttgggataaggctggattattctgagtccaagctaggcccttttgctaatcatgttcatacctcttatcttcctcccacagctcctgggcaacgtgctggtctgtgtgctggcccatcactttggcaaagaattgggattcgaaccggtgtgctgggcggggggcggcgggccctcccgcagaacaccatgcgctcttcggaagcatcgacatggtagacttcctgtgatttggtagtctaccatgtcgatgcttctgaggagcgccttgacagcagccatgggagggccgccccctacctcagtgactcgaggggtggcatccctgtgacccctccccagtgcctctcctggccctggaagttgccactccagtgcccaccagccttgtcctaataaaattaagttgcatcattttgtctgactaggtgtccttctataatattatggggtggaggggggtggtatggagcaaggggcaagttgggaagacaacctgtagggcctgcggggtctattgggaaccaagctggagtgcagtggcacaatcttggctcactgcaatctccgcctcctgggttcaagcgattctcctgcctcagcctcccgagttgttgggattccaggcatgcatgaccaggctcagctaatttttgtttttttggtagagacggggtttcaccatattggccaggctggtctccaactcctaatctcaggtgatctacccaccttggcctcccaaattgctgggattacaggcgtgaaccactgctcccttccctgtccttatcgatgctacgtagataagtagcatggcgggttaatcattaactacagaggaacccctagtgatggagttggccactccctctctgcgcgctcgctcgctcactgaggccgggcgaccaaaggtcgcccgacgcccgggctttgcccgggcggcctcagtgagcgagcgagcgcgcagctgcctgcagg

SEQ ID NO: 5486 - DNA, 2289 bp, synthetic construct
  source 1..2289: mol_type = other DNA
cctgcaggcagctgcgcgctcgctcgctcactgaggccgcccgggcaaagcccgggcgtcgggcgacctttggtcgcccggcctcagtgagcgagcgagcgcgcagagagggagtggccaactccatcactaggggttccttgtagttaatgattaacccgccatgctacttatctacgtagccatgcgtcgacataacgcgtcgacattgattattgactagttattaatagtaatcaattacggggtcattagttcatagcccatatatggagttccgcgttacataacttacggtaaatggcccgcctggctgaccgcccaacgacccccgcccattgacgtcaataatgacgtatgttcccatagtaacgccaatagggactttccattgacgtcaatgggtggagtatttacggtaaactgcccacttggcagtacatcaagtgtatcatatgccaagtacgccccctattgacgtcaatgacggtaaatggcccgcctggcattatgcccagtacatgaccttatgggactttcctacttggcagtacatctacgtattagtcatcgctattaccatgtcgaggccacgttctgcttcactctccccatctcccccccctccccacccccaattttgtatttatttattttttaattattttgtgcagcgatgggggcggggggggggggcgcgcgccaggcggggcggggcggggcgaggggcggggcggggcgaggcggagaggtgcggcggcagccaatcagagcggcgcgctccgaaagtttccttttatggcgaggcggcggcggcggcggccctataaaaagcgaagcgcgcggcgggcgggagcaagcttcgtttagtgaaccgtcagatcgcctggagacgccatccacgctgttttgacctccatagaagacaccgggaccgatccagcctccgcggattcgaatcccggccgggaacggtgcattggaacgcggattccccgtgccaagagtgacgtaagtaccgcctatagagtctataggcccacaaaaaatgctttcttcttttaatatacttttttgtttatcttatttctaatactttccctaatctctttctttcagggcaataatgatacaatgtatcatgcctctttgcaccattctaaagaataacagtgataatttctgggttaaggcaatagcaatatttctgcatataaatatttctgcatataaattgtaactgatgtaagaggtttcatattgctaatagcagctacaatccagctaccattctgcttttattttatggttgggataaggctggattattctgagtccaagctaggcccttttgctaatcatgttcatacctcttatcttcctcccacagctcctgggcaacgtgctggtctgtgtgctggcccatcactttggcaaagaattgggattcgaaccggtgtgctgggcggggggcggcgggccctcccgcagaacaccatgcgctcttcggaagctcctcgcagttcggtttcctgtgatttggtaaccgaactgcgaggagcttctgaggagcgccttgacagcagccatgggagggccgccccctacctcagtgactcgaggggtggcatccctgtgacccctccccagtgcctctcctggccctggaagttgccactccagtgcccaccagccttgtcctaataaaattaagttgcatcattttgtctgactaggtgtccttctataatattatggggtggaggggggtggtatggagcaaggggcaagttgggaagacaacctgtagggcctgcggggtctattgggaaccaagctggagtgcagtggcacaatcttggctcactgcaatctccgcctcctgggttcaagcgattctcctgcctcagcctcccgagttgttgggattccaggcatgcatgaccaggctcagctaatttttgtttttttggtagagacggggtttcaccatattggccaggctggtctccaactcctaatctcaggtgatctacccaccttggcctcccaaattgctgggattacaggcgtgaaccactgctcccttccctgtccttatcgatgctacgtagataagtagcatggcgggttaatcattaactacagaggaacccctagtgatggagttggccactccctctctgcgcgctcgctcgctcactgaggccgggcgaccaaaggtcgcccgacgcccgggctttgcccgggcggcctcagtgagcgagcgagcgcgcagctgcctgcagg

SEQ ID NO: 5487 - DNA, 2289 bp, synthetic construct
  source 1..2289: mol_type = other DNA
cctgcaggcagctgcgcgctcgctcgctcactgaggccgcccgggcaaagcccgggcgtcgggcgacctttggtcgcccggcctcagtgagcgagcgagcgcgcagagagggagtggccaactccatcactaggggttccttgtagttaatgattaacccgccatgctacttatctacgtagccatgcgtcgacataacgcgtcgacattgattattgactagttattaatagtaatcaattacggggtcattagttcatagcccatatatggagttccgcgttacataacttacggtaaatggcccgcctggctgaccgcccaacgacccccgcccattgacgtcaataatgacgtatgttcccatagtaacgccaatagggactttccattgacgtcaatgggtggagtatttacggtaaactgcccacttggcagtacatcaagtgtatcatatgccaagtacgccccctattgacgtcaatgacggtaaatggcccgcctggcattatgcccagtacatgaccttatgggactttcctacttggcagtacatctacgtattagtcatcgctattaccatgtcgaggccacgttctgcttcactctccccatctcccccccctccccacccccaattttgtatttatttattttttaattattttgtgcagcgatgggggcggggggggggggcgcgcgccaggcggggcggggcggggcgaggggcggggcggggcgaggcggagaggtgcggcggcagccaatcagagcggcgcgctccgaaagtttccttttatggcgaggcggcggcggcggcggccctataaaaagcgaagcgcgcggcgggcgggagcaagcttcgtttagtgaaccgtcagatcgcctggagacgccatccacgctgttttgacctccatagaagacaccgggaccgatccagcctccgcggattcgaatcccggccgggaacggtgcattggaacgcggattccccgtgccaagagtgacgtaagtaccgcctatagagtctataggcccacaaaaaatgctttcttcttttaatatacttttttgtttatcttatttctaatactttccctaatctctttctttcagggcaataatgatacaatgtatcatgcctctttgcaccattctaaagaataacagtgataatttctgggttaaggcaatagcaatatttctgcatataaatatttctgcatataaattgtaactgatgtaagaggtttcatattgctaatagcagctacaatccagctaccattctgcttttattttatggttgggataaggctggattattctgagtccaagctaggcccttttgctaatcatgttcatacctcttatcttcctcccacagctcctgggcaacgtgctggtctgtgtgctggcccatcactttggcaaagaattgggattcgaaccggtgtgctgggcggggggcggcgggccctcccgcagaacaccatgcgctcttcggaaggctttggctcgggactttcctgtgatttggtaagtcccgagccaaagccttctgaggagcgccttgacagcagccatgggagggccgccccctacctcagtgactcgaggggtggcatccctgtgacccctccccagtgcctctcctggccctggaagttgccactccagtgcccaccagccttgtcctaataaaattaagttgcatcattttgtctgactaggtgtccttctataatattatggggtggaggggggtggtatggagcaaggggcaagttgggaagacaacctgtagggcctgcggggtctattgggaaccaagctggagtgcagtggcacaatcttggctcactgcaatctccgcctcctgggttcaagcgattctcctgcctcagcctcccgagttgttgggattccaggcatgcatgaccaggctcagctaatttttgtttttttggtagagacggggtttcaccatattggccaggctggtctccaactcctaatctcaggtgatctacccaccttggcctcccaaattgctgggattacaggcgtgaaccactgctcccttccctgtccttatcgatgctacgtagataagtagcatggcgggttaatcattaactacagaggaacccctagtgatggagttggccactccctctctgcgcgctcgctcgctcactgaggccgggcgaccaaaggtcgcccgacgcccgggctttgcccgggcggcctcagtgagcgagcgagcgcgcagctgcctgcagg

SEQ ID NO: 5488 - DNA, 2289 bp, synthetic construct
  source 1..2289: mol_type = other DNA
cctgcaggcagctgcgcgctcgctcgctcactgaggccgcccgggcaaagcccgggcgtcgggcgacctttggtcgcccggcctcagtgagcgagcgagcgcgcagagagggagtggccaactccatcactaggggttccttgtagttaatgattaacccgccatgctacttatctacgtagccatgcgtcgacataacgcgtcgacattgattattgactagttattaatagtaatcaattacggggtcattagttcatagcccatatatggagttccgcgttacataacttacggtaaatggcccgcctggctgaccgcccaacgacccccgcccattgacgtcaataatgacgtatgttcccatagtaacgccaatagggactttccattgacgtcaatgggtggagtatttacggtaaactgcccacttggcagtacatcaagtgtatcatatgccaagtacgccccctattgacgtcaatgacggtaaatggcccgcctggcattatgcccagtacatgaccttatgggactttcctacttggcagtacatctacgtattagtcatcgctattaccatgtcgaggccacgttctgcttcactctccccatctcccccccctccccacccccaattttgtatttatttattttttaattattttgtgcagcgatgggggcggggggggggggcgcgcgccaggcggggcggggcggggcgaggggcggggcggggcgaggcggagaggtgcggcggcagccaatcagagcggcgcgctccgaaagtttccttttatggcgaggcggcggcggcggcggccctataaaaagcgaagcgcgcggcgggcgggagcaagcttcgtttagtgaaccgtcagatcgcctggagacgccatccacgctgttttgacctccatagaagacaccgggaccgatccagcctccgcggattcgaatcccggccgggaacggtgcattggaacgcggattccccgtgccaagagtgacgtaagtaccgcctatagagtctataggcccacaaaaaatgctttcttcttttaatatacttttttgtttatcttatttctaatactttccctaatctctttctttcagggcaataatgatacaatgtatcatgcctctttgcaccattctaaagaataacagtgataatttctgggttaaggcaatagcaatatttctgcatataaatatttctgcatataaattgtaactgatgtaagaggtttcatattgctaatagcagctacaatccagctaccattctgcttttattttatggttgggataaggctggattattctgagtccaagctaggcccttttgctaatcatgttcatacctcttatcttcctcccacagctcctgggcaacgtgctggtctgtgtgctggcccatcactttggcaaagaattgggattcgaaccggtgtgctgggcggggggcggcgggccctcccgcagaacaccatgcgctcttcggaagactggaagggatgacaaccctgtgacctggtttgtcatcgcttccagtcttctgtggagcgccttgacagcagccatgggagggccgccccctacctcagtgactcgaggggtggcatccctgtgacccctccccagtgcctctcctggccctggaagttgccactccagtgcccaccagccttgtcctaataaaattaagttgcatcattttgtctgactaggtgtccttctataatattatggggtggaggggggtggtatggagcaaggggcaagttgggaagacaacctgtagggcctgcggggtctattgggaaccaagctggagtgcagtggcacaatcttggctcactgcaatctccgcctcctgggttcaagcgattctcctgcctcagcctcccgagttgttgggattccaggcatgcatgaccaggctcagctaatttttgtttttttggtagagacggggtttcaccatattggccaggctggtctccaactcctaatctcaggtgatctacccaccttggcctcccaaattgctgggattacaggcgtgaaccactgctcccttccctgtccttatcgatgctacgtagataagtagcatggcgggttaatcattaactacagaggaacccctagtgatggagttggccactccctctctgcgcgctcgctcgctcactgaggccgggcgaccaaaggtcgcccgacgcccgggctttgcccgggcggcctcagtgagcgagcgagcgcgcagctgcctgcagg

SEQ ID NO: 5489 - DNA, 2289 bp, synthetic construct
  source 1..2289: mol_type = other DNA
cctgcaggcagctgcgcgctcgctcgctcactgaggccgcccgggcaaagcccgggcgtcgggcgacctttggtcgcccggcctcagtgagcgagcgagcgcgcagagagggagtggccaactccatcactaggggttccttgtagttaatgattaacccgccatgctacttatctacgtagccatgcgtcgacataacgcgtcgacattgattattgactagttattaatagtaatcaattacggggtcattagttcatagcccatatatggagttccgcgttacataacttacggtaaatggcccgcctggctgaccgcccaacgacccccgcccattgacgtcaataatgacgtatgttcccatagtaacgccaatagggactttccattgacgtcaatgggtggagtatttacggtaaactgcccacttggcagtacatcaagtgtatcatatgccaagtacgccccctattgacgtcaatgacggtaaatggcccgcctggcattatgcccagtacatgaccttatgggactttcctacttggcagtacatctacgtattagtcatcgctattaccatgtcgaggccacgttctgcttcactctccccatctcccccccctccccacccccaattttgtatttatttattttttaattattttgtgcagcgatgggggcggggggggggggcgcgcgccaggcggggcggggcggggcgaggggcggggcggggcgaggcggagaggtgcggcggcagccaatcagagcggcgcgctccgaaagtttccttttatggcgaggcggcggcggcggcggccctataaaaagcgaagcgcgcggcgggcgggagcaagcttcgtttagtgaaccgtcagatcgcctggagacgccatccacgctgttttgacctccatagaagacaccgggaccgatccagcctccgcggattcgaatcccggccgggaacggtgcattggaacgcggattccccgtgccaagagtgacgtaagtaccgcctatagagtctataggcccacaaaaaatgctttcttcttttaatatacttttttgtttatcttatttctaatactttccctaatctctttctttcagggcaataatgatacaatgtatcatgcctctttgcaccattctaaagaataacagtgataatttctgggttaaggcaatagcaatatttctgcatataaatatttctgcatataaattgtaactgatgtaagaggtttcatattgctaatagcagctacaatccagctaccattctgcttttattttatggttgggataaggctggattattctgagtccaagctaggcccttttgctaatcatgttcatacctcttatcttcctcccacagctcctgggcaacgtgctggtctgtgtgctggcccatcactttggcaaagaattgggattcgaaccggtgtgctgggcggggggcggcgggccctcccgcagaacaccatgcgctcttcggaacttccgcgacaacgccaaccctgtgacctggtttggcgttctcgcggaagttctgtggagcgccttgacagcagccatgggagggccgccccctacctcagtgactcgaggggtggcatccctgtgacccctccccagtgcctctcctggccctggaagttgccactccagtgcccaccagccttgtcctaataaaattaagttgcatcattttgtctgactaggtgtccttctataatattatggggtggaggggggtggtatggagcaaggggcaagttgggaagacaacctgtagggcctgcggggtctattgggaaccaagctggagtgcagtggcacaatcttggctcactgcaatctccgcctcctgggttcaagcgattctcctgcctcagcctcccgagttgttgggattccaggcatgcatgaccaggctcagctaatttttgtttttttggtagagacggggtttcaccatattggccaggctggtctccaactcctaatctcaggtgatctacccaccttggcctcccaaattgctgggattacaggcgtgaaccactgctcccttccctgtccttatcgatgctacgtagataagtagcatggcgggttaatcattaactacagaggaacccctagtgatggagttggccactccctctctgcgcgctcgctcgctcactgaggccgggcgaccaaaggtcgcccgacgcccgggctttgcccgggcggcctcagtgagcgagcgagcgcgcagctgcctgcagg

SEQ ID NO: 5490 - DNA, 2289 bp, synthetic construct
  source 1..2289: mol_type = other DNA
cctgcaggcagctgcgcgctcgctcgctcactgaggccgcccgggcaaagcccgggcgtcgggcgacctttggtcgcccggcctcagtgagcgagcgagcgcgcagagagggagtggccaactccatcactaggggttccttgtagttaatgattaacccgccatgctacttatctacgtagccatgcgtcgacataacgcgtcgacattgattattgactagttattaatagtaatcaattacggggtcattagttcatagcccatatatggagttccgcgttacataacttacggtaaatggcccgcctggctgaccgcccaacgacccccgcccattgacgtcaataatgacgtatgttcccatagtaacgccaatagggactttccattgacgtcaatgggtggagtatttacggtaaactgcccacttggcagtacatcaagtgtatcatatgccaagtacgccccctattgacgtcaatgacggtaaatggcccgcctggcattatgcccagtacatgaccttatgggactttcctacttggcagtacatctacgtattagtcatcgctattaccatgtcgaggccacgttctgcttcactctccccatctcccccccctccccacccccaattttgtatttatttattttttaattattttgtgcagcgatgggggcggggggggggggcgcgcgccaggcggggcggggcggggcgaggggcggggcggggcgaggcggagaggtgcggcggcagccaatcagagcggcgcgctccgaaagtttccttttatggcgaggcggcggcggcggcggccctataaaaagcgaagcgcgcggcgggcgggagcaagcttcgtttagtgaaccgtcagatcgcctggagacgccatccacgctgttttgacctccatagaagacaccgggaccgatccagcctccgcggattcgaatcccggccgggaacggtgcattggaacgcggattccccgtgccaagagtgacgtaagtaccgcctatagagtctataggcccacaaaaaatgctttcttcttttaatatacttttttgtttatcttatttctaatactttccctaatctctttctttcagggcaataatgatacaatgtatcatgcctctttgcaccattctaaagaataacagtgataatttctgggttaaggcaatagcaatatttctgcatataaatatttctgcatataaattgtaactgatgtaagaggtttcatattgctaatagcagctacaatccagctaccattctgcttttattttatggttgggataaggctggattattctgagtccaagctaggcccttttgctaatcatgttcatacctcttatcttcctcccacagctcctgggcaacgtgctggtctgtgtgctggcccatcactttggcaaagaattgggattcgaaccggtgtgctgggcggggggcggcgggccctcccgcagaacaccatgcgctcttcggaagcatcgacaaggtagactccctgtgacctggtagtctaccatgtcgatgcttctgtggagcgccttgacagcagccatgggagggccgccccctacctcagtgactcgaggggtggcatccctgtgacccctccccagtgcctctcctggccctggaagttgccactccagtgcccaccagccttgtcctaataaaattaagttgcatcattttgtctgactaggtgtccttctataatattatggggtggaggggggtggtatggagcaaggggcaagttgggaagacaacctgtagggcctgcggggtctattgggaaccaagctggagtgcagtggcacaatcttggctcactgcaatctccgcctcctgggttcaagcgattctcctgcctcagcctcccgagttgttgggattccaggcatgcatgaccaggctcagctaatttttgtttttttggtagagacggggtttcaccatattggccaggctggtctccaactcctaatctcaggtgatctacccaccttggcctcccaaattgctgggattacaggcgtgaaccactgctcccttccctgtccttatcgatgctacgtagataagtagcatggcgggttaatcattaactacagaggaacccctagtgatggagttggccactccctctctgcgcgctcgctcgctcactgaggccgggcgaccaaaggtcgcccgacgcccgggctttgcccgggcggcctcagtgagcgagcgagcgcgcagctgcctgcagg

SEQ ID NO: 5491 - DNA, 2289 bp, synthetic construct
  source 1..2289: mol_type = other DNA
cctgcaggcagctgcgcgctcgctcgctcactgaggccgcccgggcaaagcccgggcgtcgggcgacctttggtcgcccggcctcagtgagcgagcgagcgcgcagagagggagtggccaactccatcactaggggttccttgtagttaatgattaacccgccatgctacttatctacgtagccatgcgtcgacataacgcgtcgacattgattattgactagttattaatagtaatcaattacggggtcattagttcatagcccatatatggagttccgcgttacataacttacggtaaatggcccgcctggctgaccgcccaacgacccccgcccattgacgtcaataatgacgtatgttcccatagtaacgccaatagggactttccattgacgtcaatgggtggagtatttacggtaaactgcccacttggcagtacatcaagtgtatcatatgccaagtacgccccctattgacgtcaatgacggtaaatggcccgcctggcattatgcccagtacatgaccttatgggactttcctacttggcagtacatctacgtattagtcatcgctattaccatgtcgaggccacgttctgcttcactctccccatctcccccccctccccacccccaattttgtatttatttattttttaattattttgtgcagcgatgggggcggggggggggggcgcgcgccaggcggggcggggcggggcgaggggcggggcggggcgaggcggagaggtgcggcggcagccaatcagagcggcgcgctccgaaagtttccttttatggcgaggcggcggcggcggcggccctataaaaagcgaagcgcgcggcgggcgggagcaagcttcgtttagtgaaccgtcagatcgcctggagacgccatccacgctgttttgacctccatagaagacaccgggaccgatccagcctccgcggattcgaatcccggccgggaacggtgcattggaacgcggattccccgtgccaagagtgacgtaagtaccgcctatagagtctataggcccacaaaaaatgctttcttcttttaatatacttttttgtttatcttatttctaatactttccctaatctctttctttcagggcaataatgatacaatgtatcatgcctctttgcaccattctaaagaataacagtgataatttctgggttaaggcaatagcaatatttctgcatataaatatttctgcatataaattgtaactgatgtaagaggtttcatattgctaatagcagctacaatccagctaccattctgcttttattttatggttgggataaggctggattattctgagtccaagctaggcccttttgctaatcatgttcatacctcttatcttcctcccacagctcctgggcaacgtgctggtctgtgtgctggcccatcactttggcaaagaattgggattcgaaccggtgtgctgggcggggggcggcgggccctcccgcagaacaccatgcgctcttcggaagctcctcgctgttcggttccctgtgacctggtaaccgaactgcgaggagcttctgtggagcgccttgacagcagccatgggagggccgccccctacctcagtgactcgaggggtggcatccctgtgacccctccccagtgcctctcctggccctggaagttgccactccagtgcccaccagccttgtcctaataaaattaagttgcatcattttgtctgactaggtgtccttctataatattatggggtggaggggggtggtatggagcaaggggcaagttgggaagacaacctgtagggcctgcggggtctattgggaaccaagctggagtgcagtggcacaatcttggctcactgcaatctccgcctcctgggttcaagcgattctcctgcctcagcctcccgagttgttgggattccaggcatgcatgaccaggctcagctaatttttgtttttttggtagagacggggtttcaccatattggccaggctggtctccaactcctaatctcaggtgatctacccaccttggcctcccaaattgctgggattacaggcgtgaaccactgctcccttccctgtccttatcgatgctacgtagataagtagcatggcgggttaatcattaactacagaggaacccctagtgatggagttggccactccctctctgcgcgctcgctcgctcactgaggccgggcgaccaaaggtcgcccgacgcccgggctttgcccgggcggcctcagtgagcgagcgagcgcgcagctgcctgcagg

SEQ ID NO: 5492 - DNA, 2289 bp, synthetic construct
  source 1..2289: mol_type = other DNA
cctgcaggcagctgcgcgctcgctcgctcactgaggccgcccgggcaaagcccgggcgtcgggcgacctttggtcgcccggcctcagtgagcgagcgagcgcgcagagagggagtggccaactccatcactaggggttccttgtagttaatgattaacccgccatgctacttatctacgtagccatgcgtcgacataacgcgtcgacattgattattgactagttattaatagtaatcaattacggggtcattagttcatagcccatatatggagttccgcgttacataacttacggtaaatggcccgcctggctgaccgcccaacgacccccgcccattgacgtcaataatgacgtatgttcccatagtaacgccaatagggactttccattgacgtcaatgggtggagtatttacggtaaactgcccacttggcagtacatcaagtgtatcatatgccaagtacgccccctattgacgtcaatgacggtaaatggcccgcctggcattatgcccagtacatgaccttatgggactttcctacttggcagtacatctacgtattagtcatcgctattaccatgtcgaggccacgttctgcttcactctccccatctcccccccctccccacccccaattttgtatttatttattttttaattattttgtgcagcgatgggggcggggggggggggcgcgcgccaggcggggcggggcggggcgaggggcggggcggggcgaggcggagaggtgcggcggcagccaatcagagcggcgcgctccgaaagtttccttttatggcgaggcggcggcggcggcggccctataaaaagcgaagcgcgcggcgggcgggagcaagcttcgtttagtgaaccgtcagatcgcctggagacgccatccacgctgttttgacctccatagaagacaccgggaccgatccagcctccgcggattcgaatcccggccgggaacggtgcattggaacgcggattccccgtgccaagagtgacgtaagtaccgcctatagagtctataggcccacaaaaaatgctttcttcttttaatatacttttttgtttatcttatttctaatactttccctaatctctttctttcagggcaataatgatacaatgtatcatgcctctttgcaccattctaaagaataacagtgataatttctgggttaaggcaatagcaatatttctgcatataaatatttctgcatataaattgtaactgatgtaagaggtttcatattgctaatagcagctacaatccagctaccattctgcttttattttatggttgggataaggctggattattctgagtccaagctaggcccttttgctaatcatgttcatacctcttatcttcctcccacagctcctgggcaacgtgctggtctgtgtgctggcccatcactttggcaaagaattgggattcgaaccggtgtgctgggcggggggcggcgggccctcccgcagaacaccatgcgctcttcggaaggctttggcacgggacttccctgtgacctggtaagtcccgagccaaagccttctgtggagcgccttgacagcagccatgggagggccgccccctacctcagtgactcgaggggtggcatccctgtgacccctccccagtgcctctcctggccctggaagttgccactccagtgcccaccagccttgtcctaataaaattaagttgcatcattttgtctgactaggtgtccttctataatattatggggtggaggggggtggtatggagcaaggggcaagttgggaagacaacctgtagggcctgcggggtctattgggaaccaagctggagtgcagtggcacaatcttggctcactgcaatctccgcctcctgggttcaagcgattctcctgcctcagcctcccgagttgttgggattccaggcatgcatgaccaggctcagctaatttttgtttttttggtagagacggggtttcaccatattggccaggctggtctccaactcctaatctcaggtgatctacccaccttggcctcccaaattgctgggattacaggcgtgaaccactgctcccttccctgtccttatcgatgctacgtagataagtagcatggcgggttaatcattaactacagaggaacccctagtgatggagttggccactccctctctgcgcgctcgctcgctcactgaggccgggcgaccaaaggtcgcccgacgcccgggctttgcccgggcggcctcagtgagcgagcgagcgcgcagctgcctgcagg

SEQ ID NO: 5493 - DNA, 2289 bp, synthetic construct
  source 1..2289: mol_type = other DNA
cctgcaggcagctgcgcgctcgctcgctcactgaggccgcccgggcaaagcccgggcgtcgggcgacctttggtcgcccggcctcagtgagcgagcgagcgcgcagagagggagtggccaactccatcactaggggttccttgtagttaatgattaacccgccatgctacttatctacgtagccatgcgtcgacataacgcgtcgacattgattattgactagttattaatagtaatcaattacggggtcattagttcatagcccatatatggagttccgcgttacataacttacggtaaatggcccgcctggctgaccgcccaacgacccccgcccattgacgtcaataatgacgtatgttcccatagtaacgccaatagggactttccattgacgtcaatgggtggagtatttacggtaaactgcccacttggcagtacatcaagtgtatcatatgccaagtacgccccctattgacgtcaatgacggtaaatggcccgcctggcattatgcccagtacatgaccttatgggactttcctacttggcagtacatctacgtattagtcatcgctattaccatgtcgaggccacgttctgcttcactctccccatctcccccccctccccacccccaattttgtatttatttattttttaattattttgtgcagcgatgggggcggggggggggggcgcgcgccaggcggggcggggcggggcgaggggcggggcggggcgaggcggagaggtgcggcggcagccaatcagagcggcgcgctccgaaagtttccttttatggcgaggcggcggcggcggcggccctataaaaagcgaagcgcgcggcgggcgggagcaagcttcgtttagtgaaccgtcagatcgcctggagacgccatccacgctgttttgacctccatagaagacaccgggaccgatccagcctccgcggattcgaatcccggccgggaacggtgcattggaacgcggattccccgtgccaagagtgacgtaagtaccgcctatagagtctataggcccacaaaaaatgctttcttcttttaatatacttttttgtttatcttatttctaatactttccctaatctctttctttcagggcaataatgatacaatgtatcatgcctctttgcaccattctaaagaataacagtgataatttctgggttaaggcaatagcaatatttctgcatataaatatttctgcatataaattgtaactgatgtaagaggtttcatattgctaatagcagctacaatccagctaccattctgcttttattttatggttgggataaggctggattattctgagtccaagctaggcccttttgctaatcatgttcatacctcttatcttcctcccacagctcctgggcaacgtgctggtctgtgtgctggcccatcactttggcaaagaattgggattcgaaccggtgtgctgggcggggggcggcgggccctcccgcagaacaccatgcgctcttcggaagactggaagcgatgacaagcctgtgacctggtttgtcatcgcttccagtcttctgtggagcgccttgacagcagccatgggagggccgccccctacctcagtgactcgaggggtggcatccctgtgacccctccccagtgcctctcctggccctggaagttgccactccagtgcccaccagccttgtcctaataaaattaagttgcatcattttgtctgactaggtgtccttctataatattatggggtggaggggggtggtatggagcaaggggcaagttgggaagacaacctgtagggcctgcggggtctattgggaaccaagctggagtgcagtggcacaatcttggctcactgcaatctccgcctcctgggttcaagcgattctcctgcctcagcctcccgagttgttgggattccaggcatgcatgaccaggctcagctaatttttgtttttttggtagagacggggtttcaccatattggccaggctggtctccaactcctaatctcaggtgatctacccaccttggcctcccaaattgctgggattacaggcgtgaaccactgctcccttccctgtccttatcgatgctacgtagataagtagcatggcgggttaatcattaactacagaggaacccctagtgatggagttggccactccctctctgcgcgctcgctcgctcactgaggccgggcgaccaaaggtcgcccgacgcccgggctttgcccgggcggcctcagtgagcgagcgagcgcgcagctgcctgcagg

SEQ ID NO: 5494 - DNA, 2289 bp, synthetic construct
  source 1..2289: mol_type = other DNA
cctgcaggcagctgcgcgctcgctcgctcactgaggccgcccgggcaaagcccgggcgtcgggcgacctttggtcgcccggcctcagtgagcgagcgagcgcgcagagagggagtggccaactccatcactaggggttccttgtagttaatgattaacccgccatgctacttatctacgtagccatgcgtcgacataacgcgtcgacattgattattgactagttattaatagtaatcaattacggggtcattagttcatagcccatatatggagttccgcgttacataacttacggtaaatggcccgcctggctgaccgcccaacgacccccgcccattgacgtcaataatgacgtatgttcccatagtaacgccaatagggactttccattgacgtcaatgggtggagtatttacggtaaactgcccacttggcagtacatcaagtgtatcatatgccaagtacgccccctattgacgtcaatgacggtaaatggcccgcctggcattatgcccagtacatgaccttatgggactttcctacttggcagtacatctacgtattagtcatcgctattaccatgtcgaggccacgttctgcttcactctccccatctcccccccctccccacccccaattttgtatttatttattttttaattattttgtgcagcgatgggggcggggggggggggcgcgcgccaggcggggcggggcggggcgaggggcggggcggggcgaggcggagaggtgcggcggcagccaatcagagcggcgcgctccgaaagtttccttttatggcgaggcggcggcggcggcggccctataaaaagcgaagcgcgcggcgggcgggagcaagcttcgtttagtgaaccgtcagatcgcctggagacgccatccacgctgttttgacctccatagaagacaccgggaccgatccagcctccgcggattcgaatcccggccgggaacggtgcattggaacgcggattccccgtgccaagagtgacgtaagtaccgcctatagagtctataggcccacaaaaaatgctttcttcttttaatatacttttttgtttatcttatttctaatactttccctaatctctttctttcagggcaataatgatacaatgtatcatgcctctttgcaccattctaaagaataacagtgataatttctgggttaaggcaatagcaatatttctgcatataaatatttctgcatataaattgtaactgatgtaagaggtttcatattgctaatagcagctacaatccagctaccattctgcttttattttatggttgggataaggctggattattctgagtccaagctaggcccttttgctaatcatgttcatacctcttatcttcctcccacagctcctgggcaacgtgctggtctgtgtgctggcccatcactttggcaaagaattgggattcgaaccggtgtgctgggcggggggcggcgggccctcccgcagaacaccatgcgctcttcggaacttccgcgagaacgccaagcctgtgacctggtttggcgttctcgcggaagttctgtggagcgccttgacagcagccatgggagggccgccccctacctcagtgactcgaggggtggcatccctgtgacccctccccagtgcctctcctggccctggaagttgccactccagtgcccaccagccttgtcctaataaaattaagttgcatcattttgtctgactaggtgtccttctataatattatggggtggaggggggtggtatggagcaaggggcaagttgggaagacaacctgtagggcctgcggggtctattgggaaccaagctggagtgcagtggcacaatcttggctcactgcaatctccgcctcctgggttcaagcgattctcctgcctcagcctcccgagttgttgggattccaggcatgcatgaccaggctcagctaatttttgtttttttggtagagacggggtttcaccatattggccaggctggtctccaactcctaatctcaggtgatctacccaccttggcctcccaaattgctgggattacaggcgtgaaccactgctcccttccctgtccttatcgatgctacgtagataagtagcatggcgggttaatcattaactacagaggaacccctagtgatggagttggccactccctctctgcgcgctcgctcgctcactgaggccgggcgaccaaaggtcgcccgacgcccgggctttgcccgggcggcctcagtgagcgagcgagcgcgcagctgcctgcagg

SEQ ID NO: 5495 - DNA, 2289 bp, synthetic construct
  source 1..2289: mol_type = other DNA
cctgcaggcagctgcgcgctcgctcgctcactgaggccgcccgggcaaagcccgggcgtcgggcgacctttggtcgcccggcctcagtgagcgagcgagcgcgcagagagggagtggccaactccatcactaggggttccttgtagttaatgattaacccgccatgctacttatctacgtagccatgcgtcgacataacgcgtcgacattgattattgactagttattaatagtaatcaattacggggtcattagttcatagcccatatatggagttccgcgttacataacttacggtaaatggcccgcctggctgaccgcccaacgacccccgcccattgacgtcaataatgacgtatgttcccatagtaacgccaatagggactttccattgacgtcaatgggtggagtatttacggtaaactgcccacttggcagtacatcaagtgtatcatatgccaagtacgccccctattgacgtcaatgacggtaaatggcccgcctggcattatgcccagtacatgaccttatgggactttcctacttggcagtacatctacgtattagtcatcgctattaccatgtcgaggccacgttctgcttcactctccccatctcccccccctccccacccccaattttgtatttatttattttttaattattttgtgcagcgatgggggcggggggggggggcgcgcgccaggcggggcggggcggggcgaggggcggggcggggcgaggcggagaggtgcggcggcagccaatcagagcggcgcgctccgaaagtttccttttatggcgaggcggcggcggcggcggccctataaaaagcgaagcgcgcggcgggcgggagcaagcttcgtttagtgaaccgtcagatcgcctggagacgccatccacgctgttttgacctccatagaagacaccgggaccgatccagcctccgcggattcgaatcccggccgggaacggtgcattggaacgcggattccccgtgccaagagtgacgtaagtaccgcctatagagtctataggcccacaaaaaatgctttcttcttttaatatacttttttgtttatcttatttctaatactttccctaatctctttctttcagggcaataatgatacaatgtatcatgcctctttgcaccattctaaagaataacagtgataatttctgggttaaggcaatagcaatatttctgcatataaatatttctgcatataaattgtaactgatgtaagaggtttcatattgctaatagcagctacaatccagctaccattctgcttttattttatggttgggataaggctggattattctgagtccaagctaggcccttttgctaatcatgttcatacctcttatcttcctcccacagctcctgggcaacgtgctggtctgtgtgctggcccatcactttggcaaagaattgggattcgaaccggtgtgctgggcggggggcggcgggccctcccgcagaacaccatgcgctcttcggaagcatcgacatggtagactgcctgtgacctggtagtctaccatgtcgatgcttctgtggagcgccttgacagcagccatgggagggccgccccctacctcagtgactcgaggggtggcatccctgtgacccctccccagtgcctctcctggccctggaagttgccactccagtgcccaccagccttgtcctaataaaattaagttgcatcattttgtctgactaggtgtccttctataatattatggggtggaggggggtggtatggagcaaggggcaagttgggaagacaacctgtagggcctgcggggtctattgggaaccaagctggagtgcagtggcacaatcttggctcactgcaatctccgcctcctgggttcaagcgattctcctgcctcagcctcccgagttgttgggattccaggcatgcatgaccaggctcagctaatttttgtttttttggtagagacggggtttcaccatattggccaggctggtctccaactcctaatctcaggtgatctacccaccttggcctcccaaattgctgggattacaggcgtgaaccactgctcccttccctgtccttatcgatgctacgtagataagtagcatggcgggttaatcattaactacagaggaacccctagtgatggagttggccactccctctctgcgcgctcgctcgctcactgaggccgggcgaccaaaggtcgcccgacgcccgggctttgcccgggcggcctcagtgagcgagcgagcgcgcagctgcctgcagg

SEQ ID NO: 5496 - DNA, 2289 bp, synthetic construct
  source 1..2289: mol_type = other DNA
cctgcaggcagctgcgcgctcgctcgctcactgaggccgcccgggcaaagcccgggcgtcgggcgacctttggtcgcccggcctcagtgagcgagcgagcgcgcagagagggagtggccaactccatcactaggggttccttgtagttaatgattaacccgccatgctacttatctacgtagccatgcgtcgacataacgcgtcgacattgattattgactagttattaatagtaatcaattacggggtcattagttcatagcccatatatggagttccgcgttacataacttacggtaaatggcccgcctggctgaccgcccaacgacccccgcccattgacgtcaataatgacgtatgttcccatagtaacgccaatagggactttccattgacgtcaatgggtggagtatttacggtaaactgcccacttggcagtacatcaagtgtatcatatgccaagtacgccccctattgacgtcaatgacggtaaatggcccgcctggcattatgcccagtacatgaccttatgggactttcctacttggcagtacatctacgtattagtcatcgctattaccatgtcgaggccacgttctgcttcactctccccatctcccccccctccccacccccaattttgtatttatttattttttaattattttgtgcagcgatgggggcggggggggggggcgcgcgccaggcggggcggggcggggcgaggggcggggcggggcgaggcggagaggtgcggcggcagccaatcagagcggcgcgctccgaaagtttccttttatggcgaggcggcggcggcggcggccctataaaaagcgaagcgcgcggcgggcgggagcaagcttcgtttagtgaaccgtcagatcgcctggagacgccatccacgctgttttgacctccatagaagacaccgggaccgatccagcctccgcggattcgaatcccggccgggaacggtgcattggaacgcggattccccgtgccaagagtgacgtaagtaccgcctatagagtctataggcccacaaaaaatgctttcttcttttaatatacttttttgtttatcttatttctaatactttccctaatctctttctttcagggcaataatgatacaatgtatcatgcctctttgcaccattctaaagaataacagtgataatttctgggttaaggcaatagcaatatttctgcatataaatatttctgcatataaattgtaactgatgtaagaggtttcatattgctaatagcagctacaatccagctaccattctgcttttattttatggttgggataaggctggattattctgagtccaagctaggcccttttgctaatcatgttcatacctcttatcttcctcccacagctcctgggcaacgtgctggtctgtgtgctggcccatcactttggcaaagaattgggattcgaaccggtgtgctgggcggggggcggcgggccctcccgcagaacaccatgcgctcttcggaagctcctcgcagttcggttgcctgtgacctggtaaccgaactgcgaggagcttctgtggagcgccttgacagcagccatgggagggccgccccctacctcagtgactcgaggggtggcatccctgtgacccctccccagtgcctctcctggccctggaagttgccactccagtgcccaccagccttgtcctaataaaattaagttgcatcattttgtctgactaggtgtccttctataatattatggggtggaggggggtggtatggagcaaggggcaagttgggaagacaacctgtagggcctgcggggtctattgggaaccaagctggagtgcagtggcacaatcttggctcactgcaatctccgcctcctgggttcaagcgattctcctgcctcagcctcccgagttgttgggattccaggcatgcatgaccaggctcagctaatttttgtttttttggtagagacggggtttcaccatattggccaggctggtctccaactcctaatctcaggtgatctacccaccttggcctcccaaattgctgggattacaggcgtgaaccactgctcccttccctgtccttatcgatgctacgtagataagtagcatggcgggttaatcattaactacagaggaacccctagtgatggagttggccactccctctctgcgcgctcgctcgctcactgaggccgggcgaccaaaggtcgcccgacgcccgggctttgcccgggcggcctcagtgagcgagcgagcgcgcagctgcctgcagg

SEQ ID NO: 5497 - DNA, 2289 bp, synthetic construct
  source 1..2289: mol_type = other DNA
cctgcaggcagctgcgcgctcgctcgctcactgaggccgcccgggcaaagcccgggcgtcgggcgacctttggtcgcccggcctcagtgagcgagcgagcgcgcagagagggagtggccaactccatcactaggggttccttgtagttaatgattaacccgccatgctacttatctacgtagccatgcgtcgacataacgcgtcgacattgattattgactagttattaatagtaatcaattacggggtcattagttcatagcccatatatggagttccgcgttacataacttacggtaaatggcccgcctggctgaccgcccaacgacccccgcccattgacgtcaataatgacgtatgttcccatagtaacgccaatagggactttccattgacgtcaatgggtggagtatttacggtaaactgcccacttggcagtacatcaagtgtatcatatgccaagtacgccccctattgacgtcaatgacggtaaatggcccgcctggcattatgcccagtacatgaccttatgggactttcctacttggcagtacatctacgtattagtcatcgctattaccatgtcgaggccacgttctgcttcactctccccatctcccccccctccccacccccaattttgtatttatttattttttaattattttgtgcagcgatgggggcggggggggggggcgcgcgccaggcggggcggggcggggcgaggggcggggcggggcgaggcggagaggtgcggcggcagccaatcagagcggcgcgctccgaaagtttccttttatggcgaggcggcggcggcggcggccctataaaaagcgaagcgcgcggcgggcgggagcaagcttcgtttagtgaaccgtcagatcgcctggagacgccatccacgctgttttgacctccatagaagacaccgggaccgatccagcctccgcggattcgaatcccggccgggaacggtgcattggaacgcggattccccgtgccaagagtgacgtaagtaccgcctatagagtctataggcccacaaaaaatgctttcttcttttaatatacttttttgtttatcttatttctaatactttccctaatctctttctttcagggcaataatgatacaatgtatcatgcctctttgcaccattctaaagaataacagtgataatttctgggttaaggcaatagcaatatttctgcatataaatatttctgcatataaattgtaactgatgtaagaggtttcatattgctaatagcagctacaatccagctaccattctgcttttattttatggttgggataaggctggattattctgagtccaagctaggcccttttgctaatcatgttcatacctcttatcttcctcccacagctcctgggcaacgtgctggtctgtgtgctggcccatcactttggcaaagaattgggattcgaaccggtgtgctgggcggggggcggcgggccctcccgcagaacaccatgcgctcttcggaaggctttggctcgggacttgcctgtgacctggtaagtcccgagccaaagccttctgtggagcgccttgacagcagccatgggagggccgccccctacctcagtgactcgaggggtggcatccctgtgacccctccccagtgcctctcctggccctggaagttgccactccagtgcccaccagccttgtcctaataaaattaagttgcatcattttgtctgactaggtgtccttctataatattatggggtggaggggggtggtatggagcaaggggcaagttgggaagacaacctgtagggcctgcggggtctattgggaaccaagctggagtgcagtggcacaatcttggctcactgcaatctccgcctcctgggttcaagcgattctcctgcctcagcctcccgagttgttgggattccaggcatgcatgaccaggctcagctaatttttgtttttttggtagagacggggtttcaccatattggccaggctggtctccaactcctaatctcaggtgatctacccaccttggcctcccaaattgctgggattacaggcgtgaaccactgctcccttccctgtccttatcgatgctacgtagataagtagcatggcgggttaatcattaactacagaggaacccctagtgatggagttggccactccctctctgcgcgctcgctcgctcactgaggccgggcgaccaaaggtcgcccgacgcccgggctttgcccgggcggcctcagtgagcgagcgagcgcgcagctgcctgcagg

SEQ ID NO: 5498 - DNA, 2391 bp, synthetic construct
  source 1..2391: mol_type = other DNA
cctgcaggcagctgcgcgctcgctcgctcactgaggccgcccgggcaaagcccgggcgtcgggcgacctttggtcgcccggcctcagtgagcgagcgagcgcgcagagagggagtggccaactccatcactaggggttccttgtagttaatgattaacccgccatgctacttatctacgtagccatgcgtcgacataacgcgtcgacattgattattgactagttattaatagtaatcaattacggggtcattagttcatagcccatatatggagttccgcgttacataacttacggtaaatggcccgcctggctgaccgcccaacgacccccgcccattgacgtcaataatgacgtatgttcccatagtaacgccaatagggactttccattgacgtcaatgggtggagtatttacggtaaactgcccacttggcagtacatcaagtgtatcatatgccaagtacgccccctattgacgtcaatgacggtaaatggcccgcctggcattatgcccagtacatgaccttatgggactttcctacttggcagtacatctacgtattagtcatcgctattaccatgtcgaggccacgttctgcttcactctccccatctcccccccctccccacccccaattttgtatttatttattttttaattattttgtgcagcgatgggggcggggggggggggcgcgcgccaggcggggcggggcggggcgaggggcggggcggggcgaggcggagaggtgcggcggcagccaatcagagcggcgcgctccgaaagtttccttttatggcgaggcggcggcggcggcggccctataaaaagcgaagcgcgcggcgggcgggagcaagcttcgtttagtgaaccgtcagatcgcctggagacgccatccacgctgttttgacctccatagaagacaccgggaccgatccagcctccgcggattcgaatcccggccgggaacggtgcattggaacgcggattccccgtgccaagagtgacgtaagtaccgcctatagagtctataggcccacaaaaaatgctttcttcttttaatatacttttttgtttatcttatttctaatactttccctaatctctttctttcagggcaataatgatacaatgtatcatgcctctttgcaccattctaaagaataacagtgataatttctgggttaaggcaatagcaatatttctgcatataaatatttctgcatataaattgtaactgatgtaagaggtttcatattgctaatagcagctacaatccagctaccattctgcttttattttatggttgggataaggctggattattctgagtccaagctaggcccttttgctaatcatgttcatacctcttatcttcctcccacagctcctgggcaacgtgctggtctgtgtgctggcccatcactttggcaaagaattgggattcgaaccggtgaagcaaagaaggggcagagggagcccgtgagctgagtgggccagggactgggagaaggagtgaggaggcagggccggcatgcctctgctgctggccagagactggaagcgatgacaatctgtctgcacctgtcactagtttgtcatcgcttccagtctttggccgtgtagtgctacccagcgctggctgcctcctcagcattgcaattcctctcccatctgggcaccagtcagctaccctggtgggaatctgggtagccctcgaggggtggcatccctgtgacccctccccagtgcctctcctggccctggaagttgccactccagtgcccaccagccttgtcctaataaaattaagttgcatcattttgtctgactaggtgtccttctataatattatggggtggaggggggtggtatggagcaaggggcaagttgggaagacaacctgtagggcctgcggggtctattgggaaccaagctggagtgcagtggcacaatcttggctcactgcaatctccgcctcctgggttcaagcgattctcctgcctcagcctcccgagttgttgggattccaggcatgcatgaccaggctcagctaatttttgtttttttggtagagacggggtttcaccatattggccaggctggtctccaactcctaatctcaggtgatctacccaccttggcctcccaaattgctgggattacaggcgtgaaccactgctcccttccctgtccttatcgatgctacgtagataagtagcatggcgggttaatcattaactacagaggaacccctagtgatggagttggccactccctctctgcgcgctcgctcgctcactgaggccgggcgaccaaaggtcgcccgacgcccgggctttgcccgggcggcctcagtgagcgagcgagcgcgcagctgcctgcagg

SEQ ID NO: 5499 - DNA, 2391 bp, synthetic construct
  source 1..2391: mol_type = other DNA
cctgcaggcagctgcgcgctcgctcgctcactgaggccgcccgggcaaagcccgggcgtcgggcgacctttggtcgcccggcctcagtgagcgagcgagcgcgcagagagggagtggccaactccatcactaggggttccttgtagttaatgattaacccgccatgctacttatctacgtagccatgcgtcgacataacgcgtcgacattgattattgactagttattaatagtaatcaattacggggtcattagttcatagcccatatatggagttccgcgttacataacttacggtaaatggcccgcctggctgaccgcccaacgacccccgcccattgacgtcaataatgacgtatgttcccatagtaacgccaatagggactttccattgacgtcaatgggtggagtatttacggtaaactgcccacttggcagtacatcaagtgtatcatatgccaagtacgccccctattgacgtcaatgacggtaaatggcccgcctggcattatgcccagtacatgaccttatgggactttcctacttggcagtacatctacgtattagtcatcgctattaccatgtcgaggccacgttctgcttcactctccccatctcccccccctccccacccccaattttgtatttatttattttttaattattttgtgcagcgatgggggcggggggggggggcgcgcgccaggcggggcggggcggggcgaggggcggggcggggcgaggcggagaggtgcggcggcagccaatcagagcggcgcgctccgaaagtttccttttatggcgaggcggcggcggcggcggccctataaaaagcgaagcgcgcggcgggcgggagcaagcttcgtttagtgaaccgtcagatcgcctggagacgccatccacgctgttttgacctccatagaagacaccgggaccgatccagcctccgcggattcgaatcccggccgggaacggtgcattggaacgcggattccccgtgccaagagtgacgtaagtaccgcctatagagtctataggcccacaaaaaatgctttcttcttttaatatacttttttgtttatcttatttctaatactttccctaatctctttctttcagggcaataatgatacaatgtatcatgcctctttgcaccattctaaagaataacagtgataatttctgggttaaggcaatagcaatatttctgcatataaatatttctgcatataaattgtaactgatgtaagaggtttcatattgctaatagcagctacaatccagctaccattctgcttttattttatggttgggataaggctggattattctgagtccaagctaggcccttttgctaatcatgttcatacctcttatcttcctcccacagctcctgggcaacgtgctggtctgtgtgctggcccatcactttggcaaagaattgggattcgaaccggtgaagcaaagaaggggcagagggagcccgtgagctgagtgggccagggactgggagaaggagtgaggaggcagggccggcatgcctctgctgctggccagacttccgcgagaacgccaatctgtctgcacctgtcactagtttggcgttctcgcggaagtttggccgtgtagtgctacccagcgctggctgcctcctcagcattgcaattcctctcccatctgggcaccagtcagctaccctggtgggaatctgggtagccctcgaggggtggcatccctgtgacccctccccagtgcctctcctggccctggaagttgccactccagtgcccaccagccttgtcctaataaaattaagttgcatcattttgtctgactaggtgtccttctataatattatggggtggaggggggtggtatggagcaaggggcaagttgggaagacaacctgtagggcctgcggggtctattgggaaccaagctggagtgcagtggcacaatcttggctcactgcaatctccgcctcctgggttcaagcgattctcctgcctcagcctcccgagttgttgggattccaggcatgcatgaccaggctcagctaatttttgtttttttggtagagacggggtttcaccatattggccaggctggtctccaactcctaatctcaggtgatctacccaccttggcctcccaaattgctgggattacaggcgtgaaccactgctcccttccctgtccttatcgatgctacgtagataagtagcatggcgggttaatcattaactacagaggaacccctagtgatggagttggccactccctctctgcgcgctcgctcgctcactgaggccgggcgaccaaaggtcgcccgacgcccgggctttgcccgggcggcctcagtgagcgagcgagcgcgcagctgcctgcagg

SEQ ID NO: 5500 - DNA, 2391 bp, synthetic construct
  source 1..2391: mol_type = other DNA
cctgcaggcagctgcgcgctcgctcgctcactgaggccgcccgggcaaagcccgggcgtcgggcgacctttggtcgcccggcctcagtgagcgagcgagcgcgcagagagggagtggccaactccatcactaggggttccttgtagttaatgattaacccgccatgctacttatctacgtagccatgcgtcgacataacgcgtcgacattgattattgactagttattaatagtaatcaattacggggtcattagttcatagcccatatatggagttccgcgttacataacttacggtaaatggcccgcctggctgaccgcccaacgacccccgcccattgacgtcaataatgacgtatgttcccatagtaacgccaatagggactttccattgacgtcaatgggtggagtatttacggtaaactgcccacttggcagtacatcaagtgtatcatatgccaagtacgccccctattgacgtcaatgacggtaaatggcccgcctggcattatgcccagtacatgaccttatgggactttcctacttggcagtacatctacgtattagtcatcgctattaccatgtcgaggccacgttctgcttcactctccccatctcccccccctccccacccccaattttgtatttatttattttttaattattttgtgcagcgatgggggcggggggggggggcgcgcgccaggcggggcggggcggggcgaggggcggggcggggcgaggcggagaggtgcggcggcagccaatcagagcggcgcgctccgaaagtttccttttatggcgaggcggcggcggcggcggccctataaaaagcgaagcgcgcggcgggcgggagcaagcttcgtttagtgaaccgtcagatcgcctggagacgccatccacgctgttttgacctccatagaagacaccgggaccgatccagcctccgcggattcgaatcccggccgggaacggtgcattggaacgcggattccccgtgccaagagtgacgtaagtaccgcctatagagtctataggcccacaaaaaatgctttcttcttttaatatacttttttgtttatcttatttctaatactttccctaatctctttctttcagggcaataatgatacaatgtatcatgcctctttgcaccattctaaagaataacagtgataatttctgggttaaggcaatagcaatatttctgcatataaatatttctgcatataaattgtaactgatgtaagaggtttcatattgctaatagcagctacaatccagctaccattctgcttttattttatggttgggataaggctggattattctgagtccaagctaggcccttttgctaatcatgttcatacctcttatcttcctcccacagctcctgggcaacgtgctggtctgtgtgctggcccatcactttggcaaagaattgggattcgaaccggtgaagcaaagaaggggcagagggagcccgtgagctgagtgggccagggactgggagaaggagtgaggaggcagggccggcatgcctctgctgctggccagagcatcgacatggtagacttctgtctgcacctgtcactagtagtctaccatgtcgatgctttggccgtgtagtgctacccagcgctggctgcctcctcagcattgcaattcctctcccatctgggcaccagtcagctaccctggtgggaatctgggtagccctcgaggggtggcatccctgtgacccctccccagtgcctctcctggccctggaagttgccactccagtgcccaccagccttgtcctaataaaattaagttgcatcattttgtctgactaggtgtccttctataatattatggggtggaggggggtggtatggagcaaggggcaagttgggaagacaacctgtagggcctgcggggtctattgggaaccaagctggagtgcagtggcacaatcttggctcactgcaatctccgcctcctgggttcaagcgattctcctgcctcagcctcccgagttgttgggattccaggcatgcatgaccaggctcagctaatttttgtttttttggtagagacggggtttcaccatattggccaggctggtctccaactcctaatctcaggtgatctacccaccttggcctcccaaattgctgggattacaggcgtgaaccactgctcccttccctgtccttatcgatgctacgtagataagtagcatggcgggttaatcattaactacagaggaacccctagtgatggagttggccactccctctctgcgcgctcgctcgctcactgaggccgggcgaccaaaggtcgcccgacgcccgggctttgcccgggcggcctcagtgagcgagcgagcgcgcagctgcctgcagg

SEQ ID NO: 5501 - DNA, 2391 bp, synthetic construct
  source 1..2391: mol_type = other DNA
cctgcaggcagctgcgcgctcgctcgctcactgaggccgcccgggcaaagcccgggcgtcgggcgacctttggtcgcccggcctcagtgagcgagcgagcgcgcagagagggagtggccaactccatcactaggggttccttgtagttaatgattaacccgccatgctacttatctacgtagccatgcgtcgacataacgcgtcgacattgattattgactagttattaatagtaatcaattacggggtcattagttcatagcccatatatggagttccgcgttacataacttacggtaaatggcccgcctggctgaccgcccaacgacccccgcccattgacgtcaataatgacgtatgttcccatagtaacgccaatagggactttccattgacgtcaatgggtggagtatttacggtaaactgcccacttggcagtacatcaagtgtatcatatgccaagtacgccccctattgacgtcaatgacggtaaatggcccgcctggcattatgcccagtacatgaccttatgggactttcctacttggcagtacatctacgtattagtcatcgctattaccatgtcgaggccacgttctgcttcactctccccatctcccccccctccccacccccaattttgtatttatttattttttaattattttgtgcagcgatgggggcggggggggggggcgcgcgccaggcggggcggggcggggcgaggggcggggcggggcgaggcggagaggtgcggcggcagccaatcagagcggcgcgctccgaaagtttccttttatggcgaggcggcggcggcggcggccctataaaaagcgaagcgcgcggcgggcgggagcaagcttcgtttagtgaaccgtcagatcgcctggagacgccatccacgctgttttgacctccatagaagacaccgggaccgatccagcctccgcggattcgaatcccggccgggaacggtgcattggaacgcggattccccgtgccaagagtgacgtaagtaccgcctatagagtctataggcccacaaaaaatgctttcttcttttaatatacttttttgtttatcttatttctaatactttccctaatctctttctttcagggcaataatgatacaatgtatcatgcctctttgcaccattctaaagaataacagtgataatttctgggttaaggcaatagcaatatttctgcatataaatatttctgcatataaattgtaactgatgtaagaggtttcatattgctaatagcagctacaatccagctaccattctgcttttattttatggttgggataaggctggattattctgagtccaagctaggcccttttgctaatcatgttcatacctcttatcttcctcccacagctcctgggcaacgtgctggtctgtgtgctggcccatcactttggcaaagaattgggattcgaaccggtgaagcaaagaaggggcagagggagcccgtgagctgagtgggccagggactgggagaaggagtgaggaggcagggccggcatgcctctgctgctggccagagctcctcgcagttcggtttctgtctgcacctgtcactagtaaccgaactgcgaggagctttggccgtgtagtgctacccagcgctggctgcctcctcagcattgcaattcctctcccatctgggcaccagtcagctaccctggtgggaatctgggtagccctcgaggggtggcatccctgtgacccctccccagtgcctctcctggccctggaagttgccactccagtgcccaccagccttgtcctaataaaattaagttgcatcattttgtctgactaggtgtccttctataatattatggggtggaggggggtggtatggagcaaggggcaagttgggaagacaacctgtagggcctgcggggtctattgggaaccaagctggagtgcagtggcacaatcttggctcactgcaatctccgcctcctgggttcaagcgattctcctgcctcagcctcccgagttgttgggattccaggcatgcatgaccaggctcagctaatttttgtttttttggtagagacggggtttcaccatattggccaggctggtctccaactcctaatctcaggtgatctacccaccttggcctcccaaattgctgggattacaggcgtgaaccactgctcccttccctgtccttatcgatgctacgtagataagtagcatggcgggttaatcattaactacagaggaacccctagtgatggagttggccactccctctctgcgcgctcgctcgctcactgaggccgggcgaccaaaggtcgcccgacgcccgggctttgcccgggcggcctcagtgagcgagcgagcgcgcagctgcctgcagg

SEQ ID NO: 5502 - DNA, 2391 bp, synthetic construct
  source 1..2391: mol_type = other DNA
cctgcaggcagctgcgcgctcgctcgctcactgaggccgcccgggcaaagcccgggcgtcgggcgacctttggtcgcccggcctcagtgagcgagcgagcgcgcagagagggagtggccaactccatcactaggggttccttgtagttaatgattaacccgccatgctacttatctacgtagccatgcgtcgacataacgcgtcgacattgattattgactagttattaatagtaatcaattacggggtcattagttcatagcccatatatggagttccgcgttacataacttacggtaaatggcccgcctggctgaccgcccaacgacccccgcccattgacgtcaataatgacgtatgttcccatagtaacgccaatagggactttccattgacgtcaatgggtggagtatttacggtaaactgcccacttggcagtacatcaagtgtatcatatgccaagtacgccccctattgacgtcaatgacggtaaatggcccgcctggcattatgcccagtacatgaccttatgggactttcctacttggcagtacatctacgtattagtcatcgctattaccatgtcgaggccacgttctgcttcactctccccatctcccccccctccccacccccaattttgtatttatttattttttaattattttgtgcagcgatgggggcggggggggggggcgcgcgccaggcggggcggggcggggcgaggggcggggcggggcgaggcggagaggtgcggcggcagccaatcagagcggcgcgctccgaaagtttccttttatggcgaggcggcggcggcggcggccctataaaaagcgaagcgcgcggcgggcgggagcaagcttcgtttagtgaaccgtcagatcgcctggagacgccatccacgctgttttgacctccatagaagacaccgggaccgatccagcctccgcggattcgaatcccggccgggaacggtgcattggaacgcggattccccgtgccaagagtgacgtaagtaccgcctatagagtctataggcccacaaaaaatgctttcttcttttaatatacttttttgtttatcttatttctaatactttccctaatctctttctttcagggcaataatgatacaatgtatcatgcctctttgcaccattctaaagaataacagtgataatttctgggttaaggcaatagcaatatttctgcatataaatatttctgcatataaattgtaactgatgtaagaggtttcatattgctaatagcagctacaatccagctaccattctgcttttattttatggttgggataaggctggattattctgagtccaagctaggcccttttgctaatcatgttcatacctcttatcttcctcccacagctcctgggcaacgtgctggtctgtgtgctggcccatcactttggcaaagaattgggattcgaaccggtgaagcaaagaaggggcagagggagcccgtgagctgagtgggccagggactgggagaaggagtgaggaggcagggccggcatgcctctgctgctggccagaggctttggctcgggactttctgtctgcacctgtcactagtaagtcccgagccaaagcctttggccgtgtagtgctacccagcgctggctgcctcctcagcattgcaattcctctcccatctgggcaccagtcagctaccctggtgggaatctgggtagccctcgaggggtggcatccctgtgacccctccccagtgcctctcctggccctggaagttgccactccagtgcccaccagccttgtcctaataaaattaagttgcatcattttgtctgactaggtgtccttctataatattatggggtggaggggggtggtatggagcaaggggcaagttgggaagacaacctgtagggcctgcggggtctattgggaaccaagctggagtgcagtggcacaatcttggctcactgcaatctccgcctcctgggttcaagcgattctcctgcctcagcctcccgagttgttgggattccaggcatgcatgaccaggctcagctaatttttgtttttttggtagagacggggtttcaccatattggccaggctggtctccaactcctaatctcaggtgatctacccaccttggcctcccaaattgctgggattacaggcgtgaaccactgctcccttccctgtccttatcgatgctacgtagataagtagcatggcgggttaatcattaactacagaggaacccctagtgatggagttggccactccctctctgcgcgctcgctcgctcactgaggccgggcgaccaaaggtcgcccgacgcccgggctttgcccgggcggcctcagtgagcgagcgagcgcgcagctgcctgcagg

SEQ ID NO: 5503 - DNA, 141 bp, synthetic construct
  source 1..141: mol_type = other DNA
cctgcaggcagctgcgcgctcgctcgctcactgaggccgcccgggcaaagcccgggcgtcgggcgacctttggtcgcccggcctcagtgagcgagcgagcgcgcagagagggagtggccaactccatcactaggggttcct

SEQ ID NO: 5504 - DNA, 141 bp, synthetic construct
  source 1..141: mol_type = other DNA
aggaacccctagtgatggagttggccactccctctctgcgcgctcgctcgctcactgaggccgggcgaccaaaggtcgcccgacgcccgggctttgcccgggcggcctcagtgagcgagcgagcgcgcagctgcctgcagg

SEQ ID NO: 5505 - protein, 18 aa, synthetic construct
KTLNGHDSPHKSGQNLSS

SEQ ID NO: 5506 - protein, 18 aa, synthetic construct
KTLSFHDSPHKSGQNQQS

SEQ ID NO: 5507 - protein, 18 aa, synthetic construct
KTSNGSGSPHSKAQNTMT

SEQ ID NO: 5508 - protein, 18 aa, synthetic construct
KTTNGHDSPHSKAQNQQT

SEQ ID NO: 5509 - protein, 18 aa, synthetic construct
KTVNGGGSPHSKAQNQQT

SEQ ID NO: 5510 - protein, 18 aa, synthetic construct
KTVNGHDSPHKSGQNVSL

SEQ ID NO: 5511 - RNA, 19 nt, synthetic construct
  source 1..19: mol_type = other RNA
cgacatggtagactcgccc

SEQ ID NO: 5512 - RNA, 19 nt, synthetic construct
  source 1..19: mol_type = other RNA
ctcctcgcagttcggttac

SEQ ID NO: 5513 - protein, 18 aa, synthetic construct
KTVNGHESPHSKAQNQQT

SEQ ID NO: 5514 - protein, 18 aa, synthetic construct
KTVNGSGSPHSKAQGLST

SEQ ID NO: 5515 - protein, 18 aa, synthetic construct
KTVNGSGSPHSKAQNVTS

SEQ ID NO: 5516 - protein, 18 aa, synthetic construct
KTVPASGSPHSKAQNQQT

SEQ ID NO: 5517 - protein, 18 aa, synthetic construct
NTINGSGSPHSKAHNQQT

SEQ ID NO: 5518 - protein, 18 aa, synthetic construct
TTINGGGSPHSKAQNQQT

SEQ ID NO: 5519 - protein, 8 aa, synthetic construct
HDSPHSKA

SEQ ID NO: 5520-5659 - skipped (140 entries)

SEQ ID NO: 5660 - protein, 18 aa, synthetic construct
KTINGSGSPHSKAQNQQT

SEQ ID NO: 5661-5827 - skipped (167 entries)

SEQ ID NO: 5828 - protein, 18 aa, synthetic construct
KTINGHDSPHKSGQNQQT

SEQ ID NO: 5829-6400 - skipped (572 entries)

SEQ ID NO: 6401 - protein, 11 aa, synthetic construct
EKMSGSPHSKA

SEQ ID NO: 6402 - protein, 11 aa, synthetic construct
HDSPHSKAQNL

SEQ ID NO: 6403 - protein, 11 aa, synthetic construct
VNGHDSPHSKA

SEQ ID NO: 6404-6405 - skipped (2 entries)

SEQ ID NO: 6406 - protein, 8 aa, synthetic construct
GSGQNQQT